(19) United States
(12) Patent Application Publication
(10) Pub. No.: US 2020/0149053 A1
(43) Pub. Date: May 14, 2020

(54) MICROORGANISMS PROGRAMMED TO PRODUCE IMMUNE MODULATORS AND ANTI-CANCER THERAPEUTICS IN TUMOR CELLS

(71) Applicant: Synlogic Operating Company, Inc., Cambridge, MA (US)

(72) Inventors: Adam Fisher, Cambridge, MA (US); Ning Li, Winchester, MA (US); Jose M. Lora, Boston, MA (US)

(21) Appl. No.: 16/619,010

(22) PCT Filed: Jul. 11, 2018
(86) PCT No.: PCT/US2018/041705

§ 371 Date: Dec. 3, 2019

Related U.S. Application Data
(63) Continuation-in-part of application No. PCT/US18/12698, filed on Jan. 5, 2018.
(60) Provisional application No. 62/531,784, filed on Jul. 12, 2017.
(60) Provisional application No. 62/543,322, filed on Aug. 9, 2017.
(60) Provisional application No. 62/552,319, filed on Aug. 30, 2017.
(60) Provisional application No. 62/592,317, filed on Nov. 29, 2017.
(60) Provisional application No. 62/607,210, filed on Dec. 18, 2017.
(60) Provisional application No. 62/628,786, filed on Feb. 9, 2018.
(60) Provisional application No. 62/642,535, filed on Mar. 13, 2018.
(60) Provisional application No. 62/657,487, filed on Apr. 13, 2018.
(60) Provisional application No. 62/688,852, filed on Jun. 22, 2018.

(51) Int. Cl. C12N 15/70; C12N 9/24; C12N 9/10; C12N 9/48; A61K 35/74; A61P 35/00; C12N 15/90; C12N 1/20

(52) U.S. Cl. CPC C12N 15/70; C12N 9/2497; C12N 9/104; C12N 1/20; A61K 35/74; A61P 35/00; C12N 15/90; C12N 9/485

(57) ABSTRACT

Genetically programmed microorganisms, such as bacteria or virus, pharmaceutical compositions thereof, and methods of modulating and treating cancers are disclosed.

### RELATED APPLICATIONS

[0001] The instant application claims priority to U.S. Provisional Application No. 62/531,784, filed on Jul. 12, 2017; U.S. Provisional Application No. 62/543,322, filed on Aug. 9, 2017; U.S. Provisional Application No. 62/552,319, filed on Aug. 30, 2017; U.S. Provisional Application No. 62/592,317, filed on Nov. 29, 2017; U.S. Provisional Application No. 62/607,210, filed on Dec. 18, 2017; PCT Application No. PCT/US2018/012698, filed on Jan. 5, 2018; U.S. Provisional Application No. 62/628,786, filed on Feb. 9, 2018; U.S. Provisional Application No. 62/642,535, filed on Mar. 13, 2018; U.S. Provisional Application No. 62/657,487, filed on Apr. 13, 2018; and U.S. Provisional Application No. 62/688,852, filed on Jun. 22, 2018. The entire contents of each of the foregoing applications are expressly incorporated by reference herein in their entireties.

### SEQUENCE LISTING

[0002] The instant application contains a Sequence Listing which has been submitted electronically in ASCII format and is hereby incorporated by reference in its entirety. Said ASCII copy, created on Jul. 10, 2018, is named 126046-31320_SL.txt and is 1,784,310 bytes in size.

### BACKGROUND OF THE INVENTION

[0003] Current cancer therapies typically employ the use of immunotherapy, surgery, chemotherapy, radiation therapy, or some combination thereof (American Cancer Society). While these drugs have shown great benefits to cancer patients, many cancers remain difficult to treat using conventional therapies. Currently, many conventional cancer therapies are administered systemically and adversely affect healthy tissues, resulting in significant side effects. For example, many cancer therapies focus on activating the immune system to boost the patient's anti-tumor response (Kong et al., 2014). However, despite such therapies, the microenvironment surrounding tumors remains highly immune suppressive. In addition, systemic altered immunoregulation provokes immune dysfunction, including the onset of opportunistic autoimmune disorders and immune-related adverse events.

[0004] Major efforts have been made over the past few decades to develop cytotoxic drugs that specifically target cancer cells. In recent years there has been a paradigm shift in oncology in which the clinical problem of cancer is considered not only to be the accumulation of genetic abnormalities in cancer cells but also the tolerance of these abnormal cells by the immune system. Consequently, recent anti-cancer therapies have been designed specifically to target the immune system rather than cancer cells. Such therapies aim to reverse the cancer immunotolerance and stimulate an effective antitumor immune response. For example, current immunotherapies include immunostimulatory molecules that are pattern recognition receptor (PRR) agonists or immunostimulatory monoclonal antibodies that target various immune cell populations that infiltrate the tumor microenvironment. However, despite their immune-targeted design, these therapies have been developed clinically as if they were conventional anticancer drugs, relying on systemic administration of the immunotherapeutic (e.g., intravenous infusions every 2-3 weeks). As a result, many current immunotherapies suffer from toxicity due to a high dosage requirement and also often result in an undesired autoimmune response or other immune-related adverse events.

[0005] Thus, there is an unmet need for effective cancer therapies that are able to target poorly vascularized, hypoxic tumor regions specifically target cancerous cells, while minimally affecting normal tissues and boost the immune systems to fight the tumors, including avoiding or reversing the cancer immunotolerance.

### SUMMARY

[0006] The present disclosure provides compositions, methods, and uses of microorganisms that selectively target tumors and tumor cells and are able to produce one or more immune modulator(s), e.g., immune initiators or combinations of one or more immune initiators and/or one or more sustainers, which are produced locally at the tumor site. In certain aspects, the present disclosure provides microorganisms, that are engineered to produce one or more immune modulator(s), e.g., immune initiators and/or sustainers. In certain aspects, the engineered microorganism is a bacteria, e.g., Salmonella typhimurium, Escherichia coli Nissle, Clostridium novyi NT, and Clostridium butyricum miyairi, as well as other exemplary bacterial strains provided herein, are able to selectively home to tumor microenvironments. Thus, in certain embodiments, the engineered microorganisms are administered systemically, e.g., via oral administration, intravenous injection, subcutaneous injection, intra tumor injection or other means, and are able to selectively colonize a tumor site.

[0007] In one aspect, disclosed herein is a modified microorganism capable of producing at least one immune initiator. In one aspect, disclosed herein is a modified microorganism capable of producing at least one immune sustainer. In one aspect, disclosed herein is a modified microorganism capable of producing at least one immune initiator and at least one immune sustainer.

[0008] In another aspect, disclosed herein is a composition comprising an immune initiator, e.g., a cytokine, chemokine, single chain antibody, ligand, metabolic converter, T cell co-stimulatory receptor, T cell co-stimulatory receptor ligand, engineered chemotherapy, or lytic peptide; and a first modified microorganism capable of producing at least one immune sustainer. In yet another aspect, disclosed herein is a composition comprising an immune sustainer, e.g., a chemokine, a cytokine, a single chain antibody, a ligand, a metabolic converter, a T cell co-stimulatory receptor, or a T cell co-stimulatory receptor ligand; and a first modified microorganism capable of producing at least one immune initiator. In another aspect, disclosed herein is a composition comprising a first modified microorganism capable of producing at least one immune initiator and at least a second modified microorganism capable of producing at least one immune sustainer.

[0009] In one embodiment, the immune initiator is capable of enhancing oncolysis, activating antigen presenting cells (APCs), and/or priming and activating T cells. In another embodiment, the immune initiator is capable of enhancing oncolysis. In another embodiment, the immune intiator is capable of activating APCs. In yet another embodiment, the immune initiator is capable of priming and activating T cells.

[0010] In one embodiment, the immune initiator is a therapeutic molecule encoded by at least one gene. In one embodiment, the immune initiator is a therapeutic molecule produced by an enzyme encoded by at least one gene. In one embodiment, the immune imitator is at least one enzyme of a biosynthetic pathway or a catabolic pathway encoded by at least one gene. In one embodiment, the immune imitator is at least one therapeutic molecule produced by at least one enzyme of a biosynthetic pathway or a catabolic pathway encoded by at least one gene. In one embodiment, the immune imitator is a nucleic acid molecule that mediates RNA interference, microRNA response or inhibition, TLR response, antisense gene regulation, target protein binding, or gene editing.

[0011] In one embodiment, the immune imitator is a cytokine, a chemokine, a single chain antibody, a ligand, a metabolic converter, a T cell co-stimulatory receptor, a T cell co-stimulatory receptor ligand, an engineered chemotherapy, or a lytic peptide. In one embodiment, the immune initiator is a secreted peptide or a displayed peptide.

[0012] In one embodiment, the immune initiator is a STING agonist, arginine, 5-FU, TNFα, IFNγ, IFNβ1, agonistic anti-CD40 antibody, CD40L, SIRPα, GMCSF, agonistic anti-OXO40 antibody, OXO40L, agonistic anti-4-1BB antibody, 4-1BBL, agonistic anti-GITR antibody, GITRL, anti-PD1 antibody, anti-PDL1 antibody, or azurin. In one embodiment, the immune initiator is a STING agonist. In one embodiment, the immune initiator is at least one enzyme of an arginine biosynthetic pathway. In one embodiment, the immune initiator is arginine. In one embodiment, the immune initiator is 5-FU. In one embodiment, the immune initiator is TNFα. In one embodiment, the immune initiator is IFNγ. In one embodiment, the immune initiator is IFNβ1. In one embodiment, the immune initiator is an agonistic anti-CD40 antibody. In one embodiment, the immune initiator is SIRPα. In one embodiment, the immune initiator is CD40L. In one embodiment, the immune initiator is GMCSF. In one embodiment, the immune initiator is an agonistic anti-OXO40 antibody. In another embodiment, the immune initiator is OXO40L. In one embodiment, the immune initiator is an agonistic anti-4-1BB antibody. In one embodiment, the immune initiator is 4-1BBL. In one embodiment, the immune initiator is an agonistic anti-GITR antibody. In another embodiment, the immune initiator is GITRL. In one embodiment, the immune initiator is an anti-PD1 antibody. In one embodiment, the immune initiator is an anti-PDL1 antibody. In one embodiment, the immune initiator is azurin.

[0013] In one embodiment, the immune initiator is a STING agonist. In one embodiment, the STING agonist is c-diAMP. In one embodiment, the STING agonist is c-GAMP. In one embodiment, the STING agonist is c-diGMP.

[0014] In one embodiment, the modified microorganism comprises at least one gene sequence encoding an enzyme which produces the immune initiator. In one embodiment, the at least one gene sequence encoding the immune initiator is a dacA gene sequence. In one embodiment, the at least one gene sequence encoding the immune initiator is a cGAS gene sequence. In one embodiment, the cGAS gene sequence is a human cGAS gene sequence. In one embodiment, the cGAS gene sequence is selected from a human cGAS gene sequence a Verminephrobacter eiseniae cGAS gene sequence, Kingella denitrificans cGAS gene sequence, and a Neisseria bacilliformis cGAS gene sequence.

[0015] In one embodiment, the at least one gene sequence encoding the immune initiator is integrated into a chromosome of the modified microorganism. In one embodiment, the at least one gene sequence encoding the immune initiator is present on a plasmid. In one embodiment, the at least one gene sequence encoding the immune initiator is operably linked to an inducible promoter. In one embodiment, the inducible promoter is induced by low oxygen, anaerobic, or hypoxic conditions.

[0016] In one embodiment, the immune initiator is arginine. In another embodiment, the immune intiator is at least one enzyme of an arginine biosynthetic pathway.

[0017] In one embodiment, the microorganism comprises at least one gene sequence encoding the at least one enzyme of the arginine biosynthetic pathway. In one embodiment, the at least one gene sequence encoding the at least one enzyme of the arginine biosynthetic pathway comprises feedback resistant argA. In one embodiment, the at least one gene sequence encoding the at least one enzyme of the arginine biosynthetic pathway is selected from the group consisting of: argA, argB, argC, argD, argE, argF, argG, argH, argI, argJ, carA, and carB. In one embodiment, the microorganism further comprises a deletion or a mutation in an arginine repressor gene (argR). In one embodiment, the at least one gene sequence for the production of arginine is integrated into a chromosome of the modified microorganism. In one embodiment, the at least one gene sequence for the production of arginine is present on a plasmid. In one embodiment, the at least one gene sequence for the production of arginine is operably linked to an inducible promoter. In one embodiment, the inducible promoter is induced by low oxygen, anaerobic, or hypoxic conditions.

[0018] In one embodiment, the immune initiator is 5-FU.

[0019] In one embodiment, the microorganism comprises at least one gene sequence encoding an enzyme capable of converting 5-FC to 5-FU. In one embodiment, the at least one gene sequence is codA. In one embodiment, the at least one gene sequence is integrated into a chromosome of the modified microorganism. In another embodiment, the at least one gene sequence is present on a plasmid. In one embodiment, the at least one gene sequence encoding the immune initiator is operably linked to an inducible promoter. In one embodiment, the inducible promoter is an FNR promoter.

[0020] In one embodiment, the immune sustainer is capable of enhancing trafficking and infiltration of T cells, enhancing recognition of cancer cells by T cells, enhancing effector T cell response, and/or overcoming immune suppression. In one embodiment, the immune sustainer is capable of enhancing trafficking and infiltration of T cells. In one embodiment, the immune sustainer is capable of enhancing recognition of cancer cells by T cells. In one embodiment, the immune sustainer is capable of enhancing effector T cell response. In one embodiment, the immune sustainer is capable of overcoming immune suppression.

[0021] In one embodiment, the immune sustainer is a therapeutic molecule encoded by at least one gene. In one embodiment, the immune sustainer is a therapeutic molecule produced by an enzyme encoded by at least one gene. In one embodiment, the immune sustainer is at least one enzyme of a biosynthetic or catabolic pathway encoded by at least one gene. In one embodiment, the immune sustainer is at least one therapeutic molecule produced by at least one enzyme of a biosynthetic or catabolic pathway encoded by at least one gene. In one embodiment, the immune sustainer is a nucleic acid molecule that mediates RNA interference, microRNA response or inhibition, TLR response, antisense gene regulation, target protein binding, or gene editing.

[0022] In one embodiment, the immune sustainer is a cytokine, a chemokine, a single chain antibody, a ligand, a metabolic converter, a T cell co-stimulatory receptor, a T cell co-stimulatory receptor ligand, or a secreted or displayed peptide.

[0023] In one embodiment, the immune sustainer is a metabolic converter, arginine, a STING agonist, CXCL9, CXCL10, anti-PD1 antibody, anti-PDL1 antibody, anti-CTLA4 antibody, agonistic anti-GITR antibody or GITRL, agonistic anti-OX40 antibody or OX40L, agonistic anti-4-1BB antibody or 4-1BBL, IL-15, IL-15 sushi, IFNγ, or IL-12. In one embodiment, the immune sustainer is a secreted peptide or a displayed peptide.

[0024] In one embodiment, the immune sustainer is a metabolic converter. In one embodiment, the metabolic converter is at least one enzyme of a kynurenine consumption pathway. In another embodiment, the metabolic converter is at least one enzyme of an adenosine consumption pathway. In another embodiment, the metabolic converter is at least one enzyme of an arginine biosynthetic pathway.

[0025] In one embodiment, the microorganism comprises at least one gene sequence encoding the at least one enzyme of the kynurenine consumption pathway. In one embodiment, the at least one gene sequence encoding the at least one enzyme of the kynurenine consumption pathway is a kynureninase gene sequence. In one embodiment, he at least one gene sequence is kynU. In one embodiment, the at least one gene sequence is operably linked to a constitutive promoter. In one embodiment, the at least one gene sequence encoding the at least one enzyme of the kynurenine consumption pathway is integrated into a chromosome of the microorganism. In another embodiment, the at least one gene sequence encoding the at least one enzyme of the kynurenine consumption pathway is present on a plasmid. In one embodiment, the microorganism comprises a deletion or a mutation in trpE.

[0026] In one embodiment, the microorganism comprises at least one gene sequence encoding at least one enzyme of an adenosine consumption pathway. In one embodiment, the at least one gene sequence encoding the at least one enzyme of the adenosine consumption pathway is selected from add, xapA, deoD, xdhA, xdhB, and xdhC. In one embodiment, the at least one gene sequence encoding the at least one enzyme of the adenosine consumption pathway is operably linked to a promoter induced by low oxygen, anaerobic, or hypoxic conditions. In one embodiment, the at least one gene sequence encoding the at least one enzyme of the adenosine consumption pathway is integrated into a chromosome of the microorganism. In another embodiment, the at least one gene sequence is present on a plasmid. In one embodiment, the modified microorganism comprises at least one gene sequence encoding an enzyme for importing adenosine into the microorganism. In one embodiment, the at least one gene sequence encoding the enzyme for importing adenosine into the microorganism is nupC or nupG.

[0027] In one embodiment, the immune sustainer is arginine. In one embodiment, the microorganism comprises at least one gene sequence encoding at least one enzyme of the arginine biosynthetic pathway. In one embodiment, the at least one gene sequence encoding at least one enzyme of the arginine biosynthetic pathway comprises feedback resistant argA. In one embodiment, the at least one gene sequence encoding the at least one enzyme of the arginine biosynthetic pathway is selected from the group consisting of: argA, argB, argC, argD, argE, argF, argG, argH, argI, argJ, carA, and carB. In one embodiment, the at least one gene sequence encoding the at least one enzyme of the arginine biosynthetic pathway is operably linked to a promoter induced by low oxygen, anaerobic, or hypoxic conditions. In one embodiment, the at least one gene sequence encoding the at least one enzyme of the arginine biosynthetic pathway is integrated into a chromosome of the modified microorganism or is present on a plasmid. In one embodiment, the microorganism further comprises a deletion or a mutation in an arginine repressor gene (argR).

[0028] In one embodiment, the immune sustainer is a STING agonist. In one embodiment, the STING agonist is c-diAMP, c-GAMP, or c-diGMP. In another embodiment, the modified microorganism comprises at least one gene sequence encoding an enzyme which produces the STING agonist. In one embodiment, the at least one gene sequence encoding the immune sustainer is a dacA gene sequence. In one embodiment, the at least one gene sequence encoding the immune sustainer is a cGAS gene sequence. In one embodiment, the cGAS gene sequence is selected from a human cGAS gene sequence, a Verminephrobacter eiseniae cGAS gene sequence, Kingella denitrificans cGAS gene sequence, and a Neisseria bacilliformis cGAS gene sequence.

[0029] In one embodiment, the immune initiator is not the same as the immune sustainer. In one embodiment, the immune initiator is different than the immune sustainer.

[0030] In one embodiment, the modified microorganism comprises at least one gene sequence encoding an enzyme capable of producing the STING agonist. In one embodiment, the at least one gene sequence encoding the STING agonist is a dacA gene. In one embodiment, the at least one gene sequence encoding the STING agonist is a cGAS gene. In one embodiment, the STING agonist is c-diAMP. In one embodiment, the STING agonist is c-GAMP. In one embodiment, the STING agonist is c-diGMP.

[0031] In one embodiment, the bacterium is an auxotroph in a gene that is not complemented when the bacterium is present in a tumor. In one embodiment, the gene that is not complemented when the bacterium is present in a tumor is a dapA gene. In one embodiment, expression of the dapA gene fine-tunes the expression of the one or more immune initiators. In one embodiment, the bacterium is an auxotroph in a gene that is complemented when the bacterium is present in a tumor. In one embodiment, the gene that is complemented when the bacterium is present in a tumor is a thyA gene.

[0032] In one embodiment, the bacterium further comprises a mutation or deletion in an endogenous prophage.

[0033] In one embodiment, the at least one gene sequence is operably linked to an inducible promoter. In one embodiment, the inducible promoter is induced by low-oxygen or anaerobic conditions. In one embodiment, the inducible promoter is induced by the hypoxic environment of a tumor. In one embodiment, the promoter is an FNR promoter.

[0034] In one embodiment, the at least one gene sequence is integrated into a chromosome in the bacterium. In one embodiment, the at least one gene sequence is located on a plasmid in the bacterium.

[0035] In one embodiment, the bacterium is non-pathogenic. In one embodiment, he bacterium is Escherichia coli Nissle.

[0036] In one aspect, disclosed herein is a modified microorganism capable of producing an effector molecule, wherein the effector molecule is selected from the group consisting of CXCL9, CXCL10, hyaluronidase, and SIRPα.

[0037] In one embodiment, the modified microorganism comprises at least one gene sequence encoding CXCL9. In one embodiment, the at least one gene sequence encoding CXCL9 is linked to an inducible promoter.

[0038] In one embodiment, the modified microorganism comprises at least one gene sequence encoding CXCL10. In one embodiment, the at least one gene sequence encoding CXCL10 is linked to an inducible promoter.

[0039] In one embodiment, the modified microorganism comprises at least one gene sequence encoding hyaluronidase. In one embodiment, the at least one gene sequence encoding hyaluronidase is linked to an inducible promoter.

[0040] In one embodiment, the modified microorganism comprises at least one gene sequence encoding the SIRPα. In one embodiment, the at least one gene sequence encoding the SIRPα is linked to an inducible promoter.

[0041] In one embodiment, the effector molecule is secreted. In another embodiment, the effector molecule is displayed on the cell surface.

[0042] In one aspect, disclosed herein is a modified microorganism capable of converting 5-FC to 5-FU. In another aspect, disclosed herein is a modified microorganism capable of converting 5-FC to 5-FU, wherein the modified microorganism is further capable of producing a STING agonist.

[0043] In one embodiment, the microorganism comprises at least one gene sequence encoding an enzyme capable of converting 5-FC to 5-FU. In one embodiment, the at least one gene sequence is codA. In one embodiment, the at least one gene sequence is a codA::upp fusion. In one embodiment, the at least one gene sequence is operably linked to an inducible promoter or a constitutive promoter. In one embodiment, the inducible promoter is a FNR promoter. In one embodiment, the at least one gene sequence is integrated into the chromosome of the microorganism or is present on a plasmid.

[0044] In one embodiment, the microorganism capable of converting 5-FC to 5-FU is further capable of producing a STING agonist. In one embodiment, the STING agonist is c-diAMP, c-GAMP, or c-diGMP. In one embodiment, the modified microorganism comprises at least one gene sequence encoding an enzyme which produces the STING agonist. In one embodiment, the at least one gene sequence encoding the enzyme which produces the STING agonist is a dacA gene sequence. In one embodiment, the at least one gene sequence encoding the enzyme which produces the STING agonist is a cGAS gene sequence. In one embodiment, the cGAS gene sequence is a human cGAS gene sequence. In one embodiment, the at least one gene sequence encoding the enzyme which produces the STING agonist is operably linked to an inducible promoter. In one embodiment, the inducible promoter is an FNR promoter. In one embodiment, the at least one gene sequence encoding the enzyme which produces the STING agonist is integrated into a chromosome of the microorganism or is present on a plasmid.

[0045] In another aspect, disclosed herein is a modified microorganism capable of secreting a dimerized IL-12, wherein the modified microorganism comprises a gene sequence comprising a p35 IL-12 subunit gene sequence linked to a p40 IL-12 subunit gene sequence by a linker sequence, and a secretion tag sequence. In one embodiment, the secretion tag sequence is selected from the group consisting of SEQ ID NO: 1235, 1146-1154, 1156, and 1168. In one embodiment, the linker sequence comprises SEQ ID NO: 1194. In one embodiment, the p35 IL-12 subunit gene sequence comprises SEQ ID NO: 1192, and wherein the p40 IL-12 subunit gene sequence comprises SEQ ID NO: 1193. In one embodiment, the gene sequence comprises a sequence selected from the group consisting of SEQ ID NOs: 1169-1179. In one embodiment, the gene sequence is operably linked to an inducible promoter. In one embodiment, the inducible promoter is an FNR promoter. In one embodiment, the gene sequence is integrated into a chromosome of the microorganism or is present on a plasmid.

[0046] In another aspect, disclosed herein is a modified microorganism capable of secreting an IL-15 fusion protein, wherein the modified microorganism comprises a sequence comprising an IL-15 gene sequence fused to a sushi domain sequence. In one embodiment, the sequence is selected from the group consisting of SEQ ID NOs: 1195-1198.

[0047] In one embodiment, the modified microorganism disclosed herein is a bacterium. In one embodiment, the modified microorganism disclosed herein is a yeast. In one embodiment, the modified microorganism is an E. coli bacterium. In one embodiment, the modified microorganism is an E. coli Nissle bacterium.

[0048] In one embodiment, the modified microorganism disclosed herein comprises at least one mutation or deletion in a gene which results in one or more auxotrophies. In one embodiment, the at least one deletion or mutation is in a dapA gene and/or a thyA gene.

[0049] In one embodiment, the modified microorganism disclosed herein comprises a phage deletion.

[0050] In one aspect, disclosed herein is a composition comprising at least a first modified microorganism capable of producing an immune initiator, and at least a second modified microorganism capable of producing an immune sustainer.

[0051] In one aspect, disclosed herein is a composition comprising an immune sustainer and at least one modified microorganism capable of producing an immune initiator. In one embodiment, the at least one modified microorganism is capable of producing both the immune intiator and the immune sustainer. In another embodiment, the at least one modified microorganism is capable of producing the immune initiator, and at least a second modified microorganism is capable of producing the immune sustainer. In yet another embodiment, the immune sustainer is not produced by a modified microorganism in the composition.

[0052] In one aspect, disclosed herein is a composition comprising an immune initiator and at least one modified microorganism capable of producing an immune sustainer. In one embodiment, the at least one modified microorganism is capable of producing both the immune intiator and the immune sustainer. In another embodiment, the at least one modified microorganism is capable of producing the immune sustainer, and at least a second modified microorganism is capable of producing the immune initiator. In yet another embodiment, the immune initiator is not produced by a modified microorganism in the composition.

[0053] In one embodiment, the immune initiator is not arginine, TNFα, IFNγ, IFNβ1, GMCSF, anti-CD40 antibody, CD40L, agonistic anti-OX40 antibody, OXO40L, agonistic anti-41BB antibody, 41BBL, agonistic anti-GITR antibody, GITRL, anti-PD1 antibody, anti-PDL1 antibody, and/or azurin. In one embodiment, the immune initiator is not arginine. In one embodiment, the immune initiator is not TNFα. In one embodiment, the immune initiator is not IFNγ. In one embodiment, the immune initiator is not IFNβ1. In one embodiment, the immune initiator is not an anti-CD40 antibody. In one embodiment, the immune initiator is not CD40L. In one embodiment, the immune initiator is not GMCSF. In one embodiment, the immune initiator is not an agonistic anti-OXO40 antibody. In one embodiment, the immune initiator is not OXO40L. In one embodiment, the immune initiator is not an agonistic anti-4-1BB antibody. In one embodiment, the immune initiator is not 4-1BBL. In one embodiment, the immune initiator is not an agonistic anti-GITR antibody. In one embodiment, the immune initiator is not GITRL. In one embodiment, the immune initiator is not an anti-PD1 antibody. In one embodiment, the immune initiator is not an anti-PDL1 antibody. In one embodiment, the immune initiator is not azurin.

[0054] In one embodiment, the immune sustainer is not at least one enzyme of a kynurenine consumption pathway, at least one enzyme of an adenosine consumption pathway, anti-PD1 antibody, anti-PDL1 antibody, anti-CTLA4 antibody, IL-15, IL-15 sushi, IFNγ, agonistic anti-GITR antibody, GITRL, an agonistic anti-OX40 antibody, OX40L, an agonistic anti-4-1BB antibody, 4-1BBL, or IL-12. In one embodiment, the immune sustainer is not at least one enzyme of a kynurenine consumption pathway. In one embodiment, the immune sustainer is not at least one enzyme of an adenosine consumption pathway. In one embodiment, the immune sustainer is not arginine. In one embodiment, the immune sustainer is not at least one enzyme of an arginine biosynthetic pathway. In one embodiment, the immune sustainer is not an anti-PD1 antibody. In one embodiment, the immune sustainer is not an anti-PDL1 antibody. In one embodiment, the immune sustainer is not an anti-CTLA4 antibody. In one embodiment, the immune sustainer is not an agonistic anti-GITR antibody. In one embodiment, the immune sustainer is not GITRL. In one embodiment, the immune sustainer is not IL-15. In one embodiment, the immune sustainer is not IL-15 sushi. In one embodiment, the immune sustainer is not IFNγ. In one embodiment, the immune sustainer is not an agonistic anti-OX40 antibody. In one embodiment, the immune sustainer is not OX40L. In one embodiment, the immune sustainer is not an agonistic anti-4-1BB antibody. In one embodiment, the immune sustainer is not 4-1BBL. In one embodiment, the immune sustainer is not IL-12.

[0055] In one aspect, disclosed herein is a pharmaceutically acceptable composition comprising a modified microorganism disclosed herein, and a pharmaceutically acceptable carrier. In one aspect, disclosed herein is a pharmaceutically acceptable composition comprising a composition disclosed herein, and a pharmaceutically acceptable carrier. In one embodiment, the composition is formulated for intratumoral injection. In another embodiment, the pharmaceutically acceptable composition is for use in treating a subject having cancer. In another embodiment, the pharmaceutically acceptable composition is for use in inducing and modulating an immune response in a subject.

[0056] In one aspect, disclosed herein is a kit comprising a pharmaceutically acceptable composition disclosed herein, and instructions for use thereof.

[0057] In one aspect, disclosed herein is a method of treating cancer in a subject, the method comprising administering to the subject a pharmaceutically acceptable composition disclosed herein, thereby treating cancer in the subject.

[0058] In one aspect, disclosed herein is a method of inducing and sustaining an immune response in a subject, the method comprising administering to the subject a pharmaceutically acceptable composition disclosed herein, thereby inducing and sustaining the immune response in the subject.

[0059] In one aspect, disclosed herein is a method of inducing and sustaining an immune response in a subject, the method comprising administering to the subject a pharmaceutically acceptable composition described herein, thereby inducing and sustaining the immune response in the subject.

[0060] In another aspect, disclosed herein is a method of inducing an abscopal effect in a subject having a tumor, the method comprising administering to the subject a pharmaceutically acceptable composition described herein, thereby inducing the abscopal effect in the subject.

[0061] In one aspect, disclosed herein is a method of inducing immunological memory in a subject having a tumor, the method comprising administering to the subject a pharmaceutically acceptable composition described herein, thereby inducing the immunological memory in the subject.

[0062] In one aspect, disclosed herein is a method of inducing partial regression of a tumor in a subject, the method comprising administering to the subject a pharmaceutically acceptable composition described herein, thereby inducing the partial regression of the tumor in the subject. In one embodiment, the partial regression is a decrease in size of the tumor by at least about 10%, at least about 25%, at least about 50%, or at least about 75%.

[0063] In one aspect, disclosed herein is a method of inducing complete regression of a tumor in a subject, the method comprising administering to the subject a pharmaceutically acceptable composition described herein, thereby inducing the complete regression of the tumor in the subject. In one embodiment, the tumor is not detectable in the subject after administration of the pharmaceutically acceptable composition.

[0064] In one aspect, disclosed herein is a method of treating cancer in a subject, the method comprising administering a first modified microorganism to the subject, wherein the first modified microorganism is capable of producing an immune initiator; and administering a second modified microorganism to the subject, wherein the second modified microorganism is capable of producing an immune sustainer, thereby treating cancer in the subject.

[0065] In one aspect, disclosed herein is a method of inducing and sustaining an immune response in a subject, the method comprising administering a first modified microorganism to the subject, wherein the first modified microorganism is capable of producing an immune initiator; and administering a second modified microorganism to the subject, wherein the second modified microorganism is capable of producing an immune sustainer, thereby inducing and sustaining the immune response in the subject.

[0066] In one embodiment, the administering steps are performed at the same time. In one embodiment, the administering of the first modified microorganism to the subject occurs before the administering of the second modified microorganism to the subject. In one embodiment, the administering of the second modified microorganism to the subject occurs before the administering of the first modified microorganism to the subject.

[0067] In one aspect, disclosed herein is a method of treating cancer in a subject, the method comprising administering a first modified microorganism to the subject, wherein the first modified microorganism is capable of producing an immune initiator; and administering an immune sustainer to the subject, thereby treating cancer in the subject.

[0068] In one aspect, disclosed herein is a method of inducing and sustaining an immune response in a subject, the method comprising administering a first modified microorganism to the subject, wherein the first modified microorganism is capable of producing an immune initiator; and administering an immune sustainer to the subject, thereby inducing and sustaining the immune response in the subject.

[0069] In one embodiment, the administering steps are performed at the same time. In one embodiment, the administering of the first modified microorganism to the subject occurs before the administering of the immune sustainer to the subject. In another embodiment, the administering of the immune sustainer to the subject occurs before the administering of the first modified microorganism to the subject.

[0070] In one aspect, disclosed herein is a method of treating cancer in a subject, the method comprising administering an immune initiator to the subject; and administering a first modified microorganism to the subject, wherein the first modified microorganism is capable of producing an immune sustainer, thereby treating cancer in the subject.

[0071] In one aspect, disclosed herein is a method of inducing and sustaining an immune response in a subject, the method comprising administering an immune initiator to the subject; and administering a first modified microorganism to the subject, wherein the first modified microorganism is capable of producing an immune sustainer, thereby inducing and sustaining the immune response in the subject.

[0072] In one embodiment, the administering steps are performed at the same time. In one embodiment, the administering of the first modified microorganism to the subject occurs before the administering of the immune initiator to the subject. In one embodiment, the administering of the immune initiator to the subject occurs before the administering of the first modified microorganism to the subject.

[0073] In one embodiment, the administering is intratumoral injection.

[0074] Accordingly, the disclosure provides compositions comprising one or more modified bacteria comprising gene sequence(s) encoding one or more immune modulators. In some embodiments, the immune modulator is an immune initiator, which may for example modulate, e.g., promote tumor lysis, antigen presentation by dendritic cells or macrophages, or T cell activation or priming Examples of such immune initiators include cytokines or chemokines, such as TNFα, IFN-gamma and IFN-beta1, a single chain antibodies, such as anti-CD40 antibodies, or (3) ligands such as SIRPα or CD40L, a metabolic enzymes (biosynthetic or catabolic), such as a STING agonist producing enzyme, or (5) cytotoxic chemotherapies. The immune modulators, e.g., immune initiators, may be operably linked to a promoter not associated with the gene sequence(s) in nature.

[0075] In some embodiments, the genetically engineered bacteria are capable of producing one or more STING agonist(s), such as c-di-AMP, 3′3′-cGAMP and/or c-2′3′-cGAMP. In some embodiments, the genetically engineered bacteria comprise gene sequences encoding a diadenylate cyclase, such as DacA, e.g., from Listeria monocytogenes. In some embodiments, the genetically engineered bacteria comprise gene sequences encoding a 3′3′-cGAMP synthase. Non-limiting examples of 3′3′-cGAMP synthases described in the instant disclosure include 3′3′-cGAMP synthase Verminephrobacter eiseniae (EF01-2 Earthworm symbiont), 3′3′-cGAMP synthase from Kingella denitrificans (ATCC 33394), and 3′3′-cGAMP synthase from Neisseria bacilliformis (ATCC BAA-1200). In some embodiments, the genetically engineered bacteria comprise gene sequences encoding a 2′3′-cGAMP synthase, such as human cGAS.

[0076] In some embodiments, the genetically engineered bacteria comprise gene sequences encoding agonists of co-stimulatory receptors, including but not limited to OX40, GITR, 41BB.

[0077] In some embodiments, the compositions of the disclosure comprise genetically engineered bacereia which comprise gene sequences encoding an engineered chemotherapy. One example of an engineered chemotherapy may be provide by engineered bacteria which are capable of converting 5-FC to 5-FU in the tumor setting.

[0078] In some embodiments, the composition further comprises one or more genetically engineered microorganism(s) comprising gene sequence(s) for producing an immune sustainer, which may modulate, e.g., enhance, tumor infiltration or the T cell response or modulate, e.g., alleviate, immune suppression. Such a sustainer may be selected from a cytokine or chemokine, a single chain antibody antagonistic peptide or ligand, and a metabolic enzyme pathways.

[0079] Examples of immune sustaining cytokines which may be produced by the genetically engineered bacteria include IL-15 and CXCL10, which may be secreted into the tumor microenvironment. Non-limiting examples of single chain antibodies include anti-PD-1, anti-PD-L1, or anti-CTLA-4, which may be secreted into the tumor microenvironment or displayed on the microorganism cell surface.

[0080] In some embodiments, the genetically engineered bacteria comprise gene sequences encoding circuitry for one or more metabolic conversions, i.e., the bacteria are cabable performing one or more enzyme-catalyzed reactions, which can be either biosynthetic or catabolic in nature. Accordingly, in some embodiments, the genetically engineered bacteria are capable of producing metabolites which modulate, e.g., promote or contribute to immune initiation and/or immune sustenance or are capable of consuming metabolites which modulate, e.g., promote, immune suppression. For example, in some embodiments, the compositions comprise genetically engineered bacteria that are capable of consuming the immunosuppressive metabolite kynurenine, e.g., by expressing kynureninase e.g., from Pseudomonas fluorescens. In some embodiments, the genetically engineered bacteria comprise gene sequences encoding an adenosine catabolic pathway and optionally a adenosine transporter, and are capable of breaking down the tumor growth promoting metabolite adenosine within the tumor microenvironment. In other embodiments, the genetically engineered bacteria are capable of producing arginine, a stimulator of T cell activation and priming. In some embodiments, the bacteria are cabable of consuming ammonia in the tumor microenvironment, reducing access to nitrogen which supports tumor growth.

[0081] In any of these compositions, the promoter operably linked to the gene sequences (s) for producing the immune modulator, e.g., the immune initiator and/or immune sustainer may an inducible promoter. In some embodiments, the promoter is induced by low-oxygen or anaerobic conditions, such as by the hypoxic environment of a tumor. Non-limiting examples of such low oxygen inducible promoters of the disclosure include FNR-inducible promoters, ANR-inducible promoters, and DNR-inducible promoters. In some embodiments, the promoter operably linked to the gene sequence(s) for producing the immune modulator, e.g., the immune initiator or immune sustainer, is directly or indirectly induced by a chemical inducer that is not normally present within the tumor. In some embodiments, the promoter is induced in vitro during fermentation in a suitable growth vessel. In some embodiments, the chemical inducer is selected from tetracycline, IPTG, arabinose, cumate, and salicylate.

[0082] In some embodiments, the composition comprises bacteria that are auxotrophs for a particular metabolite, e.g., the bacterium is an auxotroph in a gene that is not complemented when the microorganism(s) is present in the tumor. In some embodiments, the bacterium is an auxotroph in the DapA gene. In some embodiments, the composition comprises bacteria that are auxotrophs for a particular metabolite, e.g., the bacterium is an auxotroph in a gene that is complemented when the microorganism(s) is present in the tumor. In some embodiments, the bacterium is an auxotroph in the ThyA gene. In some embodiments, the bacterium is an auxotroph in the TrpE gene.

[0083] In some embodiments, the bacterium is a Gram-positive bacterium. In some embodiments, the bacterium is a Gram-negative bacterium. In some embodiments, the bacterium is an obligate anaerobic bacterium. In some embodiments, the bacterium is a facultative anaerobic bacterium. Non-limiting examples of bacteria contemplated in the disclosure include Clostridium novyi NT, and Clostridium butyricum, and Bifidobacterium longum. In some embodiments, the bacterim is selected from E. coli Nissle, and E. coli K-12.

[0084] In some embodiments, the bacterium comprises an antibiotic resistance gene sequence. In some embodiments, the one or more of the gene sequence(s) encoding the immune modulator(s) are present on a chromosome. In some embodiments, the one or more of the gene sequence(s) encoding the immune modulator(s) are present on a plasmid.

[0085] Additionally, pharmaceutical compositions are provided, further comprising one or more immune checkpoint inhibitors, such as CTLA-4 inhibitor, a PD-1 inhibitor, and a PD-L1 inhibitor. Such checkpoint inhibitors may be administered in combination, sequentially or concurrently with the genetically engineered bacteria.

[0086] Additionally, pharmaceutical compositions are provided, further comprising one or more agonists of co-stimulatory receptors, such as OX40, GITR, and/or 41BB, including but not limited to agonistic molecules, such as ligands or agonistic antibodies which are capable of binding to co-stimulatory receptors, such as OX40, GITR, and/or 41BB. Such agonistic molecules may be administered in combination, sequentially or concurrently with the genetically engineered bacteria.

[0087] In any of these embodiments, a combination of engineered bacteria can be used in conjunction with conventional cancer therapies, such as surgery, chemotherapy, targeted therapies, radiation therapy, tomotherapy, immunotherapy, cancer vaccines, hormone therapy, hyperthermia, stem cell transplant (peripheral blood, bone marrow, and cord blood transplants), photodynamic therapy, therapy, and blood product donation and transfusion, and oncolytic viruses. In any of these embodiments, the engineered bacteria can produce one or more cytotoxins or lytic peptides. In any of these embodiments, the engineered bacteria can be used in conjunction with a cancer or tumor vaccine.

[0088] In one embodiment, disclosed herein is a modified bacterium comprising at least one an immune initiator, wherein the immune initiator is capable of producing a stimulator of interferon gene (STING) agonist.

### BRIEF DESCRIPTION OF THE FIGURES

[0089] FIG. 1 depicts a schematic showing the STING Pathway in Antigen Presenting Cells.

[0090] FIG. 2 depicts a bar graph showing extracellular and intracellular cyclic-di-AMP accumulation in vitro as measured by LC/MS (SYN3527). No cyclic-di-AMP accumulation was measured in control strains which do not contain the dacA expression construct.

[0091] FIG. 3 depicts a bar graph showing cyclic-di-AMP production upon induction of SYN3527.

[0092] FIG. 4A and FIG. 4B depict relative IFNb1 mRNA expression in RAW 267.4 cells treated with with live bacteria (FIG. 4A) and heat killed bacteria (FIG. 4B). SYN=streptomycin resistant Nissle. SYN-STING=SYN3527 comprising p15-ptet-DacA (from Listeria monocytogenes).

[0093] FIG. 5A and FIG. 5B depicts graphs showing INF-b1 production (FIG. 5A) or IFN-b1 mRNA expression (FIG. 5B) in WT or TLR4−/− mouse bone marrow derived dendritic cell cultures at 4 hours post stimulation with SYN3527 (comprising tetracycline-inducible DacA from Listeria monocytogenes). SYN3527 was either left uninduced (“STING-UN”) or induced with tetracyclin “STING-IN” prior to the experiment. TLR4−/− cells are unable to respond to LPS. Low to negative levels of IFNb in non-induced bacteria indicates that IFNb induction is dependent on expression of the STING agonist Similar levels of IFNb inducation were observed in WT and TLR4−/− demonostrating that STING agonist mediated induction of IFNb is not dependent on LPS/TLR4. FIG. 5C and FIG. 5D depicts graphs showing IL-6 mRNA expression (FIG. 5C) or CD80 mRNA expression (FIG. 5D) in WT or TLR4−/− mouse bone marrow derived dendritic cells at 4 hours post stimulation with SYN3527 (comprising tetracycline-inducible DacA from Listeria monocytogenes). SYN3527 was either left uninduced (“STING-UN”) or induced with tetracyclin “STING-IN” prior to the experiment. TLR4−/− cells are unable to respond to LPS. Levels of IL-6 and CD80 are similar upon exposure to induced SYN3527 compared to non-induced or SYN94, indicating that LPS/TLR4 signaling is likely causing the majority of the signal which results in IL-6 and CD80 upregulation.

[0094] FIG. 6A and FIG. 6B depict line graphs of an in vitro analysis of the activity of the STING agonist producing strain on IFN-beta1 induction in RAW 264.7 cells at various multiplicities of infection (MOI) at 4 hours (FIG. 6A) and at 4 hours and at 45 mins (FIG. 6B) and demonstrates that SYN3527 (comprising the tetracycline inducible dacA construct) drives dose-dependent IFN-beta1 induction in RAW 264.7 cells (immortalized murine macrophage cell line). Briefly, bacteria (WT Nissle (Labeled in graph as “SYN”) or SYN3527 (labeled in graph as “SYN-STING”; comprising tetracycline-inducible DacA from Listeria monocytogenes) were co-cultured at various multiplicities of infection (MOI) with 0.5×106 RAW 264.7 cells. SYN3527 was either left uninduced or induced with tetracycline as indicated prior to the experiment. Co-cultures were incubated for 4 hours or 45 minutes as indicated and protein extracts were analyzed.

[0095] FIG. 7A depicts a schematic showing an outline of an in vivo mouse study, the results of which are shown in FIG. 7B and FIG. 7C. FIG. 7B depicts a line graph showing the average mean tumor volume of mice implanted with B16-F10 tumors and treated with saline, SYN94 (streptomycin resistant wild type Nissle) or SYN3527 (comprising the tetracycline inducible dacA construct). FIG. 7C depicts line graphs showing tumor volume of individual mice in the study. FIG. 7D depicts a graph showing the tumor weight at day 9. FIG. 7E depicts a graph showing total T cell numbers in the tumor draining lymph node at day 9 measured via flow cytometry. FIG. 7F depicts a graph showing percentage of activated (CD44 high) T cells among CD4 (conventional) and CD8 T cell subsets and FIG. 7G depicts a graph showing a lack of activation of Tregs upon STING injection in the tumor draining lymph node at day 9 as measured via flow cytometry. FIG. 7H depicts a graph showing tumor colonization.N.D.=Not detected.

[0096] FIG. 8A and FIG. 8B depict bar graphs showing the concentration of IFN-b1 in B16 tumors measured by Luminex Bead Assay at day 2 (FIG. 8A) or day 9 (FIG. 8B) after administration and induction of tet-inducible STING Agonist producing strain SYN3527 as compared to mice treated with saline or streptomycin resistant Nissle.

[0097] FIG. 9A, FIG. 9B, and FIG. 9C show cytokine kinetic analysis of SYN-STING-treated B16F10 tumors. B16F10 tumors were treated as described herein, with cohorts of tumors harvested on days 2 and 9 post treatment initiation. Tumors were homogenized, treated with protease inhibitors and frozen for future analysis. Thawed homogenates were analyzed utilizing a custom Luminex cytokine array. Panel in FIG. 9A shows cytokines indicative of innate immune cell responses which show upregulation in response to SYN-STING treatment. Panel in FIG. 9B and FIG. 9C shows cytokines associated with cytolytic and activated effector T cells. Panel in FIG. 9D shows cytokines upregulated in response to bacterial injection. Statistical significance determined using the Holm-Sidak method adjusted for multiple T test comparing experimental groups within a cohort. Group compared to saline; * P<0.05, ** P<0.005. Group compared to SYN (WT); # P<0.05. FIG. 9A depicts bar graphs showing the concentration of IL-6 (left panel), IL-1beta (middle panel) and MCP-1 (right panel) in B16 tumors measured by Luminex Bead Assay at day 2 and 9 after administration and induction of tet-inducible STING Agonist producing strain SYN3527 as compared to mice treated with saline or streptomycin resistant Nissle. FIG. 9B depicts bar graphs showing the concentration of Granzyme B (left panel), IL-2 (middle panel) and IL-15 (right panel) in B16 tumors measured by Luminex Bead Assay at day 2 and 9 after administration and induction of tet-inducible STING Agonist producing strain SYN3527 as compared to mice treated with saline or streptomycin resistant Nissle. FIG. 9C depicts bar graphs showing the concentration of IFNg (upper panel), and IL-12p′70 (lower panel) in B16 tumors measured by Luminex Bead Assay at day 2 and 9 after administration and induction of tet-inducible STING Agonist producing strain SYN3527 as compared to mice treated with saline or streptomycin resistant Nissle. FIG. 9D depicts bar graphs showing the concentration of TNF-a (upper panel), and GM-CSF (lower panel) in B16 tumors measured by Luminex Bead Assay at day 2 and 9 after administration and induction of tet-inducible STING Agonist producing strain SYN3527 as compared to mice treated with saline or streptomycin resistant Nissle. In FIG. 9A, FIG. 9B, and FIG. 9C, bars in each panel are arranged in the same order as in FIG. 9A and FIG. 9B, i.e, saline (left), streptomycin resistant wild type Nissle (middle) and SYN3527 (SYN-STING, right).

[0098] FIG. 10A, FIG. 10B and FIG. 10C depict graphs showing in vitro analysis of SYN-STING (SYN3527) activity following co-culture with dendritic cells (DCs) and macrophages. Briefly, the ability of SYN-STING to activate the STING pathway in antigen presenting cell populations was assessed. Bacteria (WT Nissle or SYN3527 (comprising tetracycline-inducible DacA from Listeria monocytogenes). were co-cultured at various multiplicities of infection (MOI) with 0.5×106 RAW 264.7 cells (immortalized murine macrophage cell line) or murine bone-marrow-derived DCs. SYN3527 was either left uninduced (“STINGun”) or induced with tetracycline “STINGin” prior to the experiment. Co-cultures were incubated for 2 or 4 hours as indicated and protein extracts were analyzed or mRNA was harvested to measure IFNβ1 gene induction via quantitative PCR. FIG. 10A and FIG. 10B depicts graphs showing IFNβ1 (FIG. 10A) or IFN-b1 mRNA induction (FIG. 10B) in mouse bone marrow derived dendritic cells either at 4 hours post stimulation (FIG. 10A) or at 2 and 4 hours post stimulation (FIG. 10B). FIG. 10C depicts the mean IFNβ1 gene induction (mRNA levels) in RAW 264.7 cells at 2 hours. Heat-killed bacteria were generated at 60° C. for 30 min. Mean Ctrl=control PBS; LPS=100 ng/mL lipopolysaccharide. All signals normalized to PBS treated controls.

[0099] FIG. 11 depicts a line graph of an in vivo analysis showing the effect of the STING agonist producing strain on tumor volume over time at three different doses (1×10\hat{ }7, 5×10\hat{ }7 and 1×10\hat{ }8) and demonstrates that SYN3527 (comprising the tetracycline inducible Listeria monocytogenes dacA construct) drives dose-dependent tumor control in the A20 lymphoma model.

[0100] FIG. 12A, FIG. 12B, FIG. 12C, and FIG. 12D depict line graphs showing each individual mouse for the study shown in FIG. 11.

[0101] FIG. 13 depicts a line graph showing that complete regressions elicited by SYN3527 (WT Tet-STING) result in long lasting immunological memory in the A20 tumor model. In contrast to the naïve controls, secondary implants were completely rejected in the animals previously treated with SYN3527 which showed complete regression. Graph shows individual tumor measurements for the indicated experimental groups.

[0102] FIG. 14A depicts a schematic of a non-limiting example of the disclosure in which a microorganism is genetically engineered to express gene sequence(s) encoding one or more enzymes for the production of a STING agonist and additionally one or more gene sequence(s) for the expression of a kynurenine consuming enzyme. Non-limiting examples of such enzymes for the production of STING agonists include dacA, e.g., from Listeria monocytogenes. Non-limiting examples of such kynurenine consuming enzymes include kynureninase (e.g., kynureninase from Pseudomonas fluorescens). More generally, immune initiator circuits (STING agonist producer or others described herein) may be combined with immune sustainer circuits (e.g., kynurenine consumption or others described herein). FIG. 14B depicts a schematic of a graph showing one embodiment of the disclosure, in which a microorganism which is genetically engineered to express an immune initiator circuit (STING agonist) and immune sustainer circuit (kynurenine circuit) first produces high levels of immune stimulator (STING agonist producing enzyme e.g., DacA, e.g., from Listeria monocytogenes) and at a later time point produces the immune sustainer (kynureninase, e.g., from Pseudomonas fluorescens). In some embodiments, expression of the immune initiator (in this case, STING agonist producing enzyme, e.g., dacA, is induced by an inducer. In some embodiments, immune sustainer (in this case kynureninase) is induced by an inducer. In some embodiments, both immune initiator (STING agonist producing enzyme, e.g., dacA) and immune sustainer (e.g., kynureninase) are induced by one or more inducer(s). Inducer #1 (e.g., inducing immune initiator dacA expression) and inducer #2 (e.g., inducing immune sustainer kynureninase expression) may be the same or different inducers. Inducer #1 and inducer #2 may be administered sequentially or concurrently. Non-limiting examples of inducers include in vivo conditions of the gut or the tumor microenvironment (e.g., low oxygen, certain nutrients, etc.), in vitro growth conditions, or chemical inducers (e.g., arabinose, cumate, and salicylate, IPTG or other chemical inducers described herein). In other embodiments, the immune initiator (e.g., STING agonist producing enzyme, e.g., dacA) and the immune sustainer (e.g., kynureninase) are driven by constitutive promoters, including but not limited to those described herein. In some embodiments, the immune initiator (e.g., STING agonist producing enzyme, e.g., dacA) is driven by an inducible promoter and the immune sustainer (e.g., kynureninase) is driven by a constitutive promoter. In some embodiments, the immune initiator (e.g., STING agonist producing enzyme, e.g., dacA) is driven by an constitutive promoter and the immune sustainer (e.g., kynureninase) is driven by an inducible promoter. In some embodiments both circuits may be integrated into the bacterial chromosome. In some embodiments both circuits may be present on a plasmid. In some embodiments both circuits may be present on a plasmid. In some embodiments one circuit may be integrated into the bacterial chromosome and another circuit may be present on a plasmid.

[0103] In yet another embodiment, one or more strain(s) of genetically engineered bacteria expressing STING agonist producing circuitry, e.g., dacA, and one or more separate strain(s) genetically engineered bacteria expressing kynurenine consumption circuitry (e.g., kynureninase) may be administered sequentially, e.g., STING agonist producer (immune stimulator) may be administered before kynurenine consumer (immune sustainer). More generally, a bacterial strain expressing circuitry for immune initiation may be administered in conjunction with a separate bacterial strain expressing circuitry for immune sustenance, e.g., the immune initiator strain may be administered prior to the immune sustainer strain. For example, a bacterial strain expressing circuitry for immune initiation may be administered prior to a separate bacterial strain expressing circuitry for immune sustenance, e.g., the immune initiator strain. Alternatively, a bacterial strain expressing circuitry for immune initiation may be administered after a separate bacterial strain expressing circuitry for immune sustenance, e.g., the immune initiator strain. In yet another embodiment, a bacterial strain expressing circuitry for immune initiation may be administered concurrently with a separate bacterial strain expressing circuitry for immune sustenance, e.g., the immune initiator strain.

[0104] FIG. 15 depicts a schematic showing how genetically engineered bacteria of the disclosure can transform the tumor microenvironment by complementing stromal in immune deficiencies to achieve wide anti-tumor activity.

[0105] FIG. 16 depicts a schematic showing combinations of mechanisms for improved anti-tumor activity.

[0106] FIG. 17A and FIG. 17B depicts bar graphs showing production of cyclic-di-AMP (FIG. 17A) and consumption of kynurenine (FIG. 17B) for STING agonist producer SN3527, kynurenine consumer SYN2028, and combination strain (STING agonist producer plus kynurenine consumer) SYN3831.

[0107] FIG. 18A depicts a graph showing the growth (CFU per gram tumor tissue) of auxotrophic mutants ΔUraA, ΔThyA, and ΔDapA in CT26 Tumors over a 72 hour time period as indicated. FIG. 18B and FIG. 18C depicts graphs showing the growth (CFU per gram tumor tissue) of the auxotrophic mutant ΔThyA (SYN1605) compared to wildtype E. coli Nissle (SYN94) in B16F10 (FIG. 18B) and EL4 (FIG. 18C) tumors over a 72 hour time period as indicated.

[0108] FIG. 19A depicts a line graph of an in vivo analysis showing the effect of SYN4023 (comprising the tetracycline inducible Listeria monocytogenes dacA construct and ΔDapA mutation) on tumor growth (median tumor volume) over time at two different doses (1e7 and 1e8 CFUs) in the B16F10 model as compared to a saline control. FIG. 19B, FIG. 19C and FIG. 19D depict line graphs showing each individual mouse for the study shown in FIG. 19A.

[0109] FIG. 20A, and FIG. 20B depict graphs showing concentration of sepsis and cytokine storm related cytokines IL-1β (FIG. 20A) and TNF-a (FIG. 20B) in the blood of mice implanted with B16F10 tumors and subsequently treated with either 1e7 CFU SYN3527 (dacA, induced with tetracycline 4 hours post dose), 1e7 CFU SYN3527 (dacA, left uninduced), 1e8 CFU SYN4023 (dacA, and ΔDapA, induced), SYN94 (unmodified bacterium) or saline as control at various time points as indicated. LPS treatment was included as a positive control for sepsis. FIG. 20C and FIG. 20D depict graphs showing c-di-AMP concentrations (FIG. 20C) or CFU counts (FIG. 20D) in the tumor at various time points as indicated.

[0110] FIG. 21A depicts a line graph of an in vivo analysis showing the effect of SYN4023 (comprising the tetracycline inducible Listeria monocytogenes dacA construct and ΔDapA mutation) compared to saline injection control on tumor growth in the A20 tumor model (median tumor volume). FIG. 21B and FIG. 21C depict line graphs showing each individual mouse for the study shown in FIG. 21A.

[0111] FIG. 22A depicts a line graph of an in vivo analysis showing the effect of SYN4023 (DAP-STING, comprising the tetracycline inducible Listeria monocytogenes dacA construct and ΔDapA mutation) on tumor medians volumes over time, alone or in combination with an immune stimulator (agonistic anti-OX40, anti-41BB, or anti-GITR antibodies), in the B16F10 model as compared to controls or single agents alone (SYN4023, anti-ox40, anti-41BB, or anti-GITR antibodies plus saline). FIG. 22B, FIG. 22C, FIG. 22D, FIG. 22E, FIG. 22F, FIG. 22G, and FIG. 22H depict line graphs showing each individual mouse for the study shown in FIG. 22A.

[0112] FIG. 23A depicts a line graph showing that SYN4023 (comprising tet-inducible dacA and delta dapA) can elicit an abscopal effect in combination with intra-tumor injected anti-OX40 antibody in the A20 tumor model. Average median tumor volume is shown for each treatment group. Treated/Injected tumors are shown on the right of the graph while tumors receiving no treatment (Un-injected) are shown on the left. FIG. 23B and FIG. 23C depict line graphs showing the tumor volumes of the individual mice (naïve mice in FIG. 23B, and mice treated with SYN4023 in FIG. 23C) over time. FIG. 23D depicts a graph showing mouse survival over the duration of the study shown in FIG. 23A. FIG. 23E depicts a graph showing average mean bodyweight over duration of the study. FIG. 23F depicts a line graph showing the results of a re-challenge study, in which mice previously treated with SYN4023 (as shown in FIG. 23A-23E and having shown complete regression upon monitoring for at least 30 days) were implanted with A20 tumors in the left flank and CT26 tumors in the right flank as compared to naïve age-matched mice implanted with the same tumors. Average median tumor volume is shown for each treatment group. FIG. 23G and FIG. 23H depict line graphs showing the tumor volumes of the individual mice from the study shown in FIG. 23F over time (naïve mice in FIG. 23G and mice previously treated with SYN4023 in FIG. 2311). FIG. 23I depicts a graph showing the entire 2-part study querying abcopal effect and immunological memory potential (rechallenge with A20 is depicted). The graph shows individual tumor measurements for the indicated experimental groups.

[0113] FIG. 24 and depicts bar graphs showing in vivo analysis of GFP expression levels achieved with ATC, aspirin, cumate, and low oxygen (FNR) inducible promoters in the B16 tumor model in the presence or absence of the inducer at 1 and 16 hours as indicated. The percentage of induced (GFP+) bacteria among all bacteria recovered (RFP+).

[0114] FIG. 25 shows the level of gene expression as measured by geometric mean fluorescence intensity (MFI) for GFP+/RFP+ bacteria for the analysis described in FIG. 24.

[0115] FIG. 26A, FIG. 26B, FIG. 26C, and FIG. 26D depict line graphs of individual mice in an in vivo analysis showing the effect of the STING agonist producing strain SYN4449 on B16-F10 tumor volume over time at three different doses (1e7 (FIG. 26B), 1e8 (FIG. 26C) and 1e9 (FIG. 26D)) and indicate that administration of SYN4449 at a dose of leg results in rejection or control of tumor growth over this time period in the B16.F10 tumor model. FIG. 26A depicts a line graph of individual mice treated with a saline control.

[0116] FIG. 27A, FIG. 27B, and FIG. 27C depict line graphs of individual mice in an in vivo analysis showing the effect of the STING agonist producing strain SYN4449 on tumor volume over time at three different doses (1e6, 1e7 and 1e8) and demonstrates that SYN4449 (comprising plasmid based FNR-dacA and delta dapA) drives dose-dependent tumor control in A20 lymphoma model. CR=complete response. FIG. 27D depicts a line graph of individual mice treated with a saline control.

[0117] FIG. 28A depicts a bar graph showing SYN4449 comprising a dapA mutation and FNR-dacA on a plasmid (ΔDAP, 15A-fnr-dacA) as compared to SYN94 (streptomycin resistant Nissle), demonstrating that SYN4449 produces c-di-AMP. FIG. 28B and FIG. 28C depict bar graphs showing in vitro c-diAMP production of SYN4910 (FIG. 28B) and SYN4939 (FIG. 28C) as compared to SYN94. FIG. 28D depicts a bar graph showing a comparison of in vitro Kynurenine consumption of SYN2306, SYN4939 and SYN94 at 0, 2, and 4 hours. SYN4910 comprises a phage deletion, a DAPA auxotrophy, a ThyA auxotrophy, and FNR-DacA integrated at the HA9/10 site (ΔΦ, ΔDAP, ΔThyA, HA9/10::fnr-DacA). SYN4939, a c-diAMP producing and kynurenine consuming combination strain, comprises chromosomally integrated, kynureninase under control of a constitutive promoter, a deletion in TrpE, a phage deletion, a DapA auxotrophy and a ThyA auxotrophy, and FNR-DacA integrated at the HA9/10 site (PSynJ23119-pKYNase, ΔTrpE, ΔΦ, ΔDAP, ΔThyA, HA9/10::fnr-DacA). SYN2306 comprises a constitutively expressed kynureninase (Pseudomonas fluorescens) and a deletion in TrpE (HA3/4::PSynJ23119-pKYNase delta TrpE). SYN94 control: streptomycin resistant Nissle.

[0118] FIG. 29A and FIG. 29B depict bar graphs showing a comparison of in vitro c-diAMP production by SYN4739 (FIG. 29A) or SYN4939 (FIG. 29B, with SYN94 (streptomycin resistance Nissle). FIG. 29C and FIG. 29D depict bar graphs showing a comparison of in vitro kynurenine consumption at 0, 2, and 4 hours by SYN2028 and SYN4739 (FIG. 29C) or SYN2306 and SYN4939 (FIG. 29D) with SYN94. SYN4739 comprises a constitutively expressed kynureninase from Pseudomonas fluorescens, a deletion in TrpE, and a ThyA auxotrophy (HA3/4::PSynJ23119-pKYNase, ΔTrpE, ΔThyA, HA9/10::fnr-DacA). SYN4939, a c-diAMP producing and kynurenine consuming combination strain, comprises chromosomally integrated, kynureninase under control of a constitutive promoter, a deletion in TrpE, a phage deletion, a DAPA auxotrophy and a ThyA auxotrophy, and FNR-DacA integrated at the HA9/10 site (PSynJ23119-pKYNase, ΔTrpE, ΔΦ, ΔDAP, ΔThyA, HA9/10::fnr-DacA). SYN2028 comprises chromosomally integrated kynureninase from Pseudomonas fluorescence under control of a constitutive promoter and a deletion in TrpE (HA3/4::PSynJ23119-pKYNase delta TrpE). SYN2306 comprises a constitutively expressed kynureninase (Pseudomonas fluorescens) and a deletion in TrpE (HA3/4::PSynJ23119-pKYNase delta TrpE). SYN94: streptomycin resistant Nissle.

[0119] FIG. 30 and FIG. 31 depict bar graphs showing a comparison of in vitro c-diAMP production and in vitro kynurenine consumption at 0, 2, and 4 hours between SYN2306, SYN4789, SYN4939, and SYN94. SYN2306 comprises a constitutively expressed kynureninase (Pseudomonas fluorescens) and a deletion in TrpE (HA3/4::PSynJ23119-pKYNase delta TrpE). SYN94: streptomycin resistance Nissle. SYN4789 comprises a constitutively expressed kynureninase from Pseudomonas fluorescens, a deletion in TrpE, and a ThyA auxotrophy (HA3/4::PSynJ23119-pKYNase, ΔTrpE, ΔThyA, HA9/10::fnr-DacA). SYN4939, a c-diAMP producing and kynurenine consuming combination strain, comprises chromosomally integrated, kynureninase under control of a constitutive promoter, a deletion in TrpE, a phage deletion, a DAPA auxotrophy and a ThyA auxotrophy, and FNR-DacA integrated at the HA9/10 site (PSynJ23119-pKYNase, ΔTrpE, ΔΦ, ΔDAP, ΔThyA, HA9/10::fnr-DacA). SYN94: streptomycin resistant Nissle.

[0120] FIG. 32 depicts a line graph of an in vitro analysis of the activity of the STING agonist producing strain SYN4737 on IFN-beta1 induction in RAW 264.7 cells at various multiplicities of infection (MOI) at 4 hours demonstrates that SYN4737 (comprising a phage deletion, a DAPA auxotrophy, and FNR-DacA integrated at the HA9/10 site (ΔΦ, ΔDAP, HA9/10::fnr-DacA)) drives dose-dependent IFN-beta1 induction in RAW 264.7 cells (immortalized murine macrophage cell line). Briefly, bacteria (WT Nissle (Labeled in graph as “SYN”) or SYN4737 were pre-induced for 4 hours in an anaerobic chamber to induce STING agonist synthesis and then were co-cultured at various multiplicities of infection (MOI) with 0.5×106 RAW 264.7 cells for 4 hours and protein present in RAW 264.7 cell supernatant were analyzed.

[0121] FIG. 33A and FIG. 33B, depict graphs showing in vitro production c-di-AMP and bacterial cGAMP, of various strains comprising cGAS orthologs (putative cGAMP synthases).

[0122] FIG. 34A and FIG. 34B depict bar graphs showing the ability of the E. coli Nissle strains SYN3529 (Nissle p15A Ptet-CodA) and SYN3620 (Nissle p15A Ptet-CodA::Upp fusion) to convert 5-FC to 5-FU. The graphs show 5-FC levels (FIG. 34A) and 5-FU levels (FIG. 34B) after an assay time of 2 hours.

[0123] FIG. 35A depicts a schematic showing an outline of an in vivo mouse study, the results of which are shown in FIG. 35B, FIG. 35C, FIG. 35D, and FIG. 35E. FIG. 35B depicts a line graph showing the average mean tumor volume of mice implanted with B16-F10 tumors and treated with PBS, SYN3620 (comprising pUC-Kan-tet-CodA::Upp fusion) or SYN3529 (comprising pUC-Kan-tet-CodA (cytosine deaminase)). FIG. 35C depicts line graphs showing tumor volume of individual mice in the study. FIG. 35D depicts a graph showing the tumor weight at day 6. FIG. 35E depicts a graph showing intratumoral concentration of 5-FC at day 6 measured via mass spectrometry.

[0124] FIG. 36A depicts a schematic showing an outline of an in vivo mouse study, the results of which are shown in FIGS. 36B and 36C. FIG. 36B depicts graphs showing bacterial colonization of tumors as measured by colony forming units (CFU). FIG. 36C depicts graphs showing the relative expression of CCR7 (left) or CD40 (right) as measured by median Mean Fluorescence Intensity (MFI) on the indicated immune cell populations for intratumoral lymphocytes isolated from CT26 tumors on day 8 measured via flow cytometry.

[0125] FIG. 37 depicts a graph showing results of a cell based assay showing IkappaBalpha degradation in HeLa cells upon treatment with supernatants of the TNFα secreter SYN2304 (PAL::Cm p15a TetR Ptet-phoA TNFa), the parental control SYN1557, and a recombinant IL-15 control.

[0126] FIG. 38A depicts a schematic showing an outline of an in vivo mouse study, the results of which are shown in FIG. 38B-38D. FIG. 38B depicts graphs showing bacterial colonization of tumors as measured by colony forming units (CFU). FIG. 38C depicts graphs showing the relative concentration of TNFα in CT26 tumors as measured by ELISA. FIG. 38D depicts a line graph showing the average mean tumor volume of mice implanted with CT26 tumors and treated with SYN (DOM Mutant) or SYN-TNFα (comprising PAL::CM p15a TetR Ptet-PhoA-TNFα).

[0127] FIG. 39A and FIG. 39B depict graphs showing results of a cell based assay showing STAT1 phosphorylation in mouse RAW264.7 cells upon treatment with supernatants of the IFNgamma secreter SYN3543 (PAL::Cm p15a Ptet-87K PhoA-mIFNg), the parental control SYN1557, and a recombinant IL-15 control.

[0128] FIG. 40A depicts a schematic showing an outline of an in vivo mouse study, the results of which are shown in FIGS. 40B and 40C. FIG. 40B depicts graphs showing bacterial colonization of tumors as measured by colony forming units (CFU). FIG. 40C depicts graphs showing the relative concentration of IFNγ in CT26 tumors as measured by ELISA.

[0129] FIG. 41 depicts a bar graph of in vitro arginine levels produced by streptomycin-resistant Nissle (SYN-UCD103), SYN-UCD205, and SYN-UCD204 under inducing (+ATC) and non-inducing (−ATC) conditions, in the presence (+O₂) or absence (−O₂) of oxygen. SYN-UCD103 is a control Nissle construct. SYN-UCD205 comprises ΔArgR and argA^{fbr} expressed under the control of a FNR-inducible promoter on a low-copy plasmid. SYN-UCD204 comprises ΔArgR and argA^{fbr} expressed under the control of a tetracycline-inducible promoter on a low-copy plasmid.

[0130] FIG. 42A and FIG. 42B depict bar graphs of ammonia levels in the media at various time points post anaerobic induction. FIG. 42A depicts a bar graph of the levels of arginine production of SYN-UCD205, SYN-UCD206, and SYN-UCD301 measured at 0, 30, 60, and 120 minutes. FIG. 42B depicts a bar graph of the levels of arginine production of SYN-UCD204 (comprising ΔArgR, PfnrS-ArgAfbr on a low-copy plasmid and wild type ThyA), SYN-UCD301, SYN-UCD302, and SYN-UCD303 (all three of which comprise an integrated FNR-ArgAfbr construct; SYN-UCD301 comprises ΔArgR, and wtThyA; SYN-302 and SYN-UCD303 both comprise ΔArgR, and ΔThyA, with chloramphenicol or kanamycin resistance, respectively). Results indicate that chromosomal integration of FNR ArgA fbr results in similar levels of arginine production as seen with the low copy plasmid strains expressing the same construct.

[0131] FIG. 43 depicts a line graph showing the in vitro efficacy (arginine production from ammonia) in an engineered bacterial strain harboring a chromosomal insertion of ArgAfbr driven by an fnr inducible promoter at the malEK locus, with ΔArgR and ΔThyA and no antibiotic resistance was assessed (SYN-UCD303). Streptomycin resistant E. coli Nissle (Nissle) is used as a reference.

[0132] FIG. 44A depicts a chart showing the administration schema for the study shown in 40A, 40B, 40C, 44E, and 44F. FIGS. 44B, 44C, 44D, 44E, and 44F depict a line graphs for each individual mouse of an in vivo analysis of the effect on tumor volume of a combination treatment with the chemotherapeutic agent cyclophosphamide (nonmyeloablative chemotherapy, preconditioning) and an arginine producing strain (SYN-UCD304; integrated FNR-ArgAfbr construct; ΔArgR, FIG. 44E) or kynurenine consuming strain (SYN2028, FIG. 44F). The effect of the combination treatment was compared to treatment with vehicle alone (FIG. 44B), cyclophosphamide alone (FIG. 44C), or SYN94 (streptomycin resistant wild type Nissle, FIG. 44D). The data suggest anti-tumor activity of the arginine producing and the kynurenine-consuming strains in combination with cyclophosphamide. In this study, BALB/c mice were implanted with CT26 tumors; cyclophosphamide (CP) was administered IP at 100 mg/kg; bacteria were administered intratumorally at 1×10^{e7} (in a 100 ul volume). The administration schema is shown in FIG. 44A.

[0133] FIG. 45A and FIG. 45B depicts the results of a human T cell transwell assay where the number of migratory cells was measured via flow cytometry following addition of SYN-CXCL10 supernatants diluted at various concentrations in SYN bacterial supernatant. Anti-CXCR3 was added to control wells containing 100% SYN-CXCL10 supernatant to validate specificity of the migration for the CXCL10-CXCR3 pathway. FIG. 45A depicts the total number of migrated cells. FIG. 45B depicts the Migration relative to no cytokine control.

[0134] FIG. 46. depicts a line graph showing the results of a cell-based assay showing STATS phosphorylation in CD3+IL15RAalpha+ T-cells upon treatment with supernatants of the IL-15 secreter SYN3525 (PAL::Cm p15a Ptet-PpiA (ECOLIN_18620)-IL-15-Sushi), the parental control SYN1557, and a recombinant IL-15 control.

[0135] FIG. 47 depicts a bar graph showing that strains SYN1565 (comprising PfnrS-nupC), SYN1584 (comprising PfnrS-nupC; PfnrS-xdhABC) SYN1655 (comprising PfnrS-nupC; PfnrS-add-xapA-deoD) and SYN1656 (comprising PfnrS-nupC; PfnrS-xdhABC; PfnrS-add-xapA-deoD) can degrade adenosine in vitro, even when glucose is present.

[0136] FIG. 48 depicts a bar graph showing adenosine degradation at substrate limiting conditions, in the presence of 1 uM adenosine, which corresponds to adenosine levels expected in the in vivo tumor environment. The results show that a low concentration of activated SYN1656 (1e6 cells), (and also other strains depicted), are capable of degrading adenosine below the limit of quantitation.

[0137] FIG. 49 depicts a line graph of an in vivo analysis of the effect of adenosine consumption by engineered E. coli Nissle (SYN1656), alone or in combination with anti-PD1, on tumor volume. The data suggest anti-tumor activity of adenosine-consuming strain as single agent and in combination with aPD-1.

[0138] FIG. 50A and FIG. 50B depict graphs showing that combination of adenosine consuming strain SYN1656 (SYN-Ade) with an anti-PD-1/anti-CTLA4 cocktail elicits high numbers of tumor rejections. To investigate the anti-tumor activity of SYN1656 in combination with anti-PD-1/anti-CTLA4 checkpoint inhibition, MC38 tumors were established in C57BL6 mice. When tumors were 60-80 mm3 in size, animals were treated bi-weekly intra-tumorally with saline control, intraperitoneally with a cocktail of anti-PD-1 and anti-CTLA4 antibodies (10 and 5 mg/kg, respectively), or with a combination of unmodified bacteria (SYN) or SYN1656 (SYN-Ade) and anti-PD-1/anti-CTLA4, and tumor volumes were assessed twice a week. FIG. 50A depicts the median tumor volume and FIG. 50B depicts the percentage of animals remaining on study over time using <2000 mm3 as a survival surrogate; FIG. 50C, FIG. 50D, FIG. 50E, and FIG. 50F depict graphs showing tumor volumes for individual animals from each treatment group.

[0139] FIG. 51 depicts a bar graph showing the kynurenine consumption rates of original and ALE evolved kynureninase expressing strains in M9 media supplemented with 75 uM kynurenine. Strains are labeled as follows: SYN1404: E. coli Nissle comprising a deletion in Trp:E and a medium copy plasmid expressing kynureninase from Pseudomonas fluorescens under the control of a tetracycline inducible promoter (Nissle deltaTrpE::CmR+Ptet-Pseudomonas KYNU p15a KanR); SYN2027: E. coli Nissle comprising a deletion in Trp:E and expressing kynureninase from Pseudomonas fluorescens under the control of a constitutive promoter (the endogenous 1pp promoter) integrated into the genome at the HA3/4 site (HA3/4::Plpp-pKYNase KanR TrpE::CmR); SYN2028: E. coli Nissle comprising a deletion in Trp:E and expressing kynureninase from Pseudomonas fluorescens under the control of a constitutive promoter (the synthetic J23119 promoter) integrated into the genome at the HA3/4 site (HA3/4::PSynJ23119-pKYNase KanR TrpE::CmR); SYN2027-R1: a first evolved strain resulting from ALE, derived from the parental SYN2027 strain (Plpp-pKYNase KanR TrpE::CmR EVOLVED STRAIN Replicate 1). SYN2027-R2: a second evolved strain resulting from ALE, derived from the parental SYN2027 strain (Plpp-pKYNase KanR TrpE::CmR EVOLVED STRAIN Replicate 2). SYN2028-R1: a first evolved strain resulting from ALE, derived from the parental SYN2028 strain (HA3/4::PSynJ23119-pKYNase KanR TrpE::CmR EVOLVED STRAIN Replicate 1). SYN2028-R2: a second evolved strain resulting from ALE, derived from the parental SYN2028 strain (HA3/4::PSynJ23119-pKYNase KanR TrpE::CmR EVOLVED STRAIN Replicate 1).

[0140] FIG. 52A and FIG. 52B depict dot plots showing intratumoral kynurenine depletion by strains producing kynureninase from Pseudomonas fluorescens. FIG. 52A depicts a dot plot showing a intra tumor concentrations observed for the kynurenine consuming strain SYN1704, carrying a constitutively expressed Pseudomonase fluorescens kynureninase on a medium copy plasmid. FIG. 52B. depicts a dot plot showing a intra tumor concentrations observed for the kynurenine consuming strain SYN2028 carrying a constitutively expressed chromosomally integrated copy of Pseudomonase fluorescens kynureninase. The IDO inhibitor INCB024360 is used as a positive control.

[0141] FIG. 53A and FIG. 53B, depict dot plots showing concentrations of intratumoral kynurenine (FIG. 53A) and plasma kynurenine (FIG. 53B) measured in mice implanted with CT26 tumors administered either saline, or SYN1704. A significant reduction in intratumoral (P<0.001) and plasma (P<0.005) concentration of kynurenine was observed for the kynurenine consuming strain SYN1704 compared to saline control. Tryptophan levels remained constant (data not shown).

[0142] FIGS. 54A, 54B, and 54C depict graphs showing the effects of single administration of a KYN-consuming strain in CT26 tumors has on tumoral KYN levels in the tumor (FIG. 54A) and plasma (FIG. 54B), and tumor weight (FIG. 54C). Mice were dosed with SYN94 or SYN1704 at the 1e8 CFU/mL via intratumoral dosing. Animals were sacrificed and blood and tissue was collected at the indicated times.

[0143] FIG. 55 depicts a Western blot analysis of bacterial supernatants showing murine CD40L1 (47-260) and CD40L2 (112-260) secreted by E. coli strains SYN3366 and SYN3367 are detected by a mCD40 antibody.

[0144] FIG. 56 depicts a line graph of an in vivo analysis of the effect of kynurenine consumption by kynurenine consuming strain SYN2028 carrying a constitutively expressed chromosomally integrated copy of Pseudomonas fluorescens kynureninase), alone or in combination with anti-CTLA4 antibody, compared to vehicle or anti-CTLA-4 antibody alone, on tumor volume. The data suggest anti-tumor activity of the kynurenine-consuming strain as single agent and in combination with anti-CTLA4 antibody, and that SYN2028 improves αCTL-4-mediated anti-tumor activity in CT26. In this study, BALB/c mice were implanted with CT26 tumors; anti-CTLA4 antibody was administered IP at 100 ug/mouse; Bacteria were administered intratumorally at 1×10^{e7}; bacteria and antibodies were all administered biweekly.

[0145] FIGS. 57A, 57B, 57C, and 57D depict line graphs showing each individual mouse for the study shown in FIG. 56. FIG. 57E depicts the corresponding Kaplan-Meier plot.

[0146] FIG. 58A, FIG. 58B, FIG. 58C, FIG. 58D, FIG. 58E depicts a line graphs showing that Kyn consumer SYN2028 in combination with αντιCTL-4 and anti-PD1 antibodies has improved anti-tumor activity in MC38 tumors. FIGS. 58B, 58C, 58D, and 58E depict line graphs showing each individual mouse for the study shown in FIG. 58A. Kyn consumer SYN2028 in combination with anti-CTL-4 and anti-PD1 antibodies has improved anti-tumor activity in MC38 tumors (FIG. 58E) over vehicle (FIG. 58B), anti-CTLA4 and anti-PD1 antibodies alone (FIG. 58C), or SYN94 (streptomycin resistant E. coli Nissle) plus anti-CTLA4 and anti-PD1 antibodies (FIG. 58D); i.e., the kynurenine consumer has the ability to improve anti-CTLA-4/anti-PD1 antibody-mediated anti-tumor activity. FIG. 58F depicts the corresponding Kaplan-Meier plot.

[0147] FIG. 59A and FIG. 59B depict an analysis of tumor colonization and in vivo activity of the kynurenine consuming strain SYN2028 (SYN-Kyn) in the B16F10 tumor model. Upon reaching a tumor size of −40-80 mm3, mice received 1e6 CFUs of unmodified (SYN-WT) or SYN2028 (SYN-Kyn) via intratumoral injection. At 24 and 72 hours post-injection, tumors were homogenized and colony forming units (CFU) were determined by plating on LB antibiotic selective plates (FIG. 59A) or kynurenine levels were determined by LCMS (FIG. 59B).

[0148] FIG. 60A and FIG. 60B depict graphs showing that SYN1565 (SYN-Ade) and SYN2028 (SYN-Kyn) demonstrate robust tumor colonization after intra-tumoral administration. To assess the ability of the adenosine-consuming strain SYN1565 or kynurenine-consuming strain SYN2028 to colonize tumors, B16.F10 tumors were established in C57BL6 mice. When tumors reached 100-150 mm3 in size, SYN1565, SYN2028 (1e6 cells/dose) or saline control were administered intra-tumorally as a single injection. Colony forming units (CFU) per gram of tumor tissue were calculated 7 days post injection and results are shown in FIG. 60A. For comparison, CFU per gram of tumor tissue of the unmodified Nissle chassis (SYN) 7 days post a single 1e6 cell/dose injection is included (FIG. 60B).

[0149] FIG. 61 depicts a Western Blot analysis of total cytosolic extracts of a wild type E. coli (lane 1) and of a strain expressing anti-PD1 scFv (lane 2).

[0150] FIG. 62 depicts a diagram of a flow cytometric analysis of PD1 expressing EL4 cells which were incubated with extracts from a strain expressing tet inducible anti-PD1-scFv, and showing that anti-PD1-scFv expressed in E. coli binds to PD1 on mouse EL4 cells.

[0151] FIG. 63 depicts a Western Blot analysis of total cytosolic extracts of various strain secreting anti-PD1 scFv. A single band was detected around 34 kDa in lane 1-6 corresponding to extracts from SYN2767, SYN2769, SYN2771, SYN2773, SYN2775 and SYN2777, respectively.

[0152] FIG. 64 depicts a diagram of a flow cytometric analysis of PD1 expressing EL4 cells, which were incubated with extracts from a E. coli Nissle strain secreting tet-inducible anti-PD1-scFv, showing that anti-PD1-scFv secreted from E. coli Nissle binds to PD1 on mouse EL4 cells.

[0153] FIG. 65 depicts a diagram of a flow cytometric analysis of PD1 expressing EL4 cells, which were incubated with various amounts of extracts (0, 2, 5, and 15 ul) from an E. coli Nissle strain secreting tet-inducible anti-PD1-scFv, showing that anti-PD1-scFv secreted from E. coli Nissle binds to PD1 on mouse EL4 cells, in a dose dependent manner.

[0154] FIG. 66A and FIG. 66B depicts diagrams of a flow cytometric analysis of EL4 cells. FIG. 66A depicts a competition assay, in which extracts from a E. coli Nissle strain secreting tet-inducible anti-PD1-scFv was incubated with various amounts of soluble PDL1 (0, 5, 10, and 30 ug) showing that PDL1 can dose-dependently compete with the binding of anti-PD1-scFv secreted from E. coli Nissle to PD1 on mouse EL4 cells. FIG. 66B shows the IgG control.

[0155] FIG. 67 depicts a Western blot analysis of bacterial supernatants from SYN2996 (lane 1), SYN3159 (lane 2), SYN3160 (lane 3), SYN3021 (lane 4), SYN3020 (lane 5), and SYN3161 (lane 6) showing that WT mSIRPα, mCV1SIRPα, mFD6×2SIRPα, mCV1SIRPα-IgG4, mFD6SIRPα-IgG4, and anti-mCD47 scFv are secreted from these strains, respectively.

[0156] FIG. 68 depicts a diagram of a flow cytometric analysis of CD47 expressing CT26 cells which were incubated with supernatants from a SYN1557 (1; ΔPAL parental strain), SYN2996 (2; expressing tet inducible mSIRPα), SYN3021 (3; expressing tet inducible anti-mCD47scFv), SYN3161 (4; expressing tet inducible mCV1SIRPα-hIgG fusion) and showing that secreted products expressed in E. coli can bind to CD47 on mouse CT26 cells.

[0157] FIG. 69 depicts a diagram of a flow cytometric analysis of CD47 expressing CT26 cells which were incubated with supernatants from a SYN1557 (1; ΔPAL parental strain), SYN3020 (2; expressing tet inducible mFD6SIRPα-hIgG fusion), SYN3160 (3; expressing tet inducible FD1×2SIRPα), SYN3159 (4; expressing tet inducible mCV1SIRPα), SYN3021 (5; expressing tet inducible mCV1SIRPα-hIgG fusion) and showing that secreted products expressed in E. coli can bind to CD47 on mouse CT26 cells.

[0158] FIG. 70 depicts a diagram of a flow cytometric analysis of CT26 cells. A competition assay was conducted, in which extracts from a E. coli Nissle strain secreting tet-inducible murine SIRPα was incubated with recombinant SIRPα showing that recombinant SIRPα can compete with the binding of SIRPα secreted from E. coli Nissle to CD47 on CT26 cells.

[0159] FIG. 71 depicts a diagram of a flow cytometric analysis of CT26 cells. A competition assay was conducted, in which extracts from a E. coli Nissle strain secreting tet-inducible murine SIRPα was incubated with an anti-CD47 antibody showing that the antibody can compete with the binding of SIRPα secreted from E. coli Nissle to CD47 on CT26 cells.

[0160] FIG. 72 depicts a Western blot analysis of bacterial supernatants from SYN2997 (lane 1) and SYN2998 (lane 2), showing that mouse and human hyaluronidases are secreted from these strains, respectively.

[0161] FIG. 73 depicts a bar graph showing hyaluronidase activity of SYN1557 (parental strain ΔPAL), SYN2997 and SYN2998 as a measure of hyaluronan degradation in an ELISA assay.

[0162] FIG. 74A depicts a Western blot analysis of bacterial supernatants from SYN3369 expressing tetracycline inducible leech hyaluronidase (lane 1) and SYN1557 (parental strain ΔPAL) (lane 2), showing that leech hyaluronidase is secreted from SYN3369. M=Marker. FIG. 74B and FIG. 74C depict a bar graphs showing hyaluronidase activity as a measure of hyaluronan degradation in an ELISA assay.

[0163] FIG. 74B shows a positive control with recombinant hyaluronidase. FIG. 74C shows hyaluronidase activity of SYN1557 (parental strain ΔPAL), and SYN3369 expressing tetracycline inducible leech hyaluronidase.

[0164] FIG. 75 depicts a map of exemplary integration sites within the E. coli 1917 Nissle chromosome. These sites indicate regions where circuit components may be inserted into the chromosome without interfering with essential gene expression. Backslashes (/) are used to show that the insertion will occur between divergently or convergently expressed genes. Insertions within biosynthetic genes, such as thyA, can be useful for creating nutrient auxotrophies. In some embodiments, an individual circuit component is inserted into more than one of the indicated sites. In some embodiments, multiple different circuits are inserted into more than one of the indicated sites. Accordingly, by inserting circuitry not multiple sites into the E. coli 1917 Nissle chromosome a genetically engineered bacterium may comprise circuitry allowing multiple mechanisms of action (MoAs).

[0165] FIG. 76 depicts a graph showing CFU of bacteria detected in the tumor at various time points post intratumoral (IT) dose with 100 ul SYN94 (streptomycin resistant Nissle) or SYN1557 (Nissle ΔPAL::CmR) (1e7 cells/dose). No bacteria were detected in the blood at these time points.

[0166] FIG. 77 depicts a graph showing CFU of bacteria detected in the tumor (CT26 at various time points post intratumoral (IT) dose with 100 ul SYN94 (streptomycin resistant Nissle) at 1e7 and 1e8 cells/dose. Bacterial counts in the tumor tissue were similar at both doses.

[0167] FIG. 78A and FIG. 78B depict graphs showing bacterial concentrations detected in various tissues (FIG. 78A) and TNFa levels measured in serum, tumor and liver (FIG. 78B) at 48 hours post intratumor administration 10⁷ CFU/dose SYN94 (streptomycin resistant Nissle) or saline administration and in naïve animals. Bacteria were predominantly present in the tumor and absent in other tissues tested. TNFa levels measured were similar in all serum, tumor and liver between SYN94, Saline treated and naïve groups.

[0168] FIG. 79 depict graphs showing high levels of c-diAMP production are achieved in vivo through anaerobic induction using a low oxygen promoter (FNR promoter) to drive expression of DacA (plasmid based FNR-DacA, ΔDAP). B16 cells were implanted at 2e5; and at day 14 post implant, when tumors reached about ˜250-400 mm3, mice were divided into three experimental groups. Group 1 was injected once with PBS (n=1); Group 2 (n=3) was injected with SYN766 (DAP-WT; leg cells). Group 3 (n=3) was injected with SYN4449 (plasmid based FNR-DacA, ΔDAP; 1e9 cells); At 24 hours post dose, tumors were extracted, and c-di-AMP production was measured by LC-MS/MS.

[0169] FIG. 80 depicts graphs showing high levels of c-diAMP production are achieved in vivo through anaerobic induction using a low oxygen promoter (FNR promoter) to drive the expression of an integrated DacA. B16 cells were implanted at 2e5; and at day 14 post implant, when tumors reached about ˜250-400 mm3, mice were divided into 2 experimental groups. Group 1 was injected once with PBS (n=3); Group 2 (n=3) was injected with SYN4910 (DAP-FNR-STING integrated further comprising ΔThyA and ΔDapA auxotrophy and phage deletion; 1e9 cells); At 24 hours post dose, tumors were extracted, and c-di-AMP production was measured by LC-MS/MS.

[0170] FIGS. 81A, 81B, 81C, and 81D depict graphs showing efficacy of SYN4910 (DAP-FNR-STING) integrated further comprising ΔThyA and ΔDapA auxotrophy and phage deletion) in the B16 model. Briefly, B16 cells were implanted as described above. Tumor growth was monitored until the tumors reached ˜100 mm\hat{ }3. On day 0, mice were randomized into groups (N=10 per group) for intratumor dosing as follows: PBS (group 1, vehicle control), SYN4740 (ΔThyA, ΔDapA, ΔΦ; group 2, 1e9 CFU,), and SYN4910 (group 3, 1e9 CFU). Tumor sizes were measured and mice were injected I.T. with bacteria or PBS on day 0, 2, and 5. Tumor volumes were recorded two times in a week. Results indicate that administration of SYN4910 drives tumor control and rejection in B16 tumor lymphoma model.

[0171] FIG. 82 depicts a graph showing production of the human cyclic GAMP (2′3′-cGAMP) analog, via the expression of human cyclic GAMP synthase (hcGAS). The genetic circuit for hcGAS comprises a p15a origin plasmid and a tetracycline-inducible promoter (Ptet) driving the expression of the coding sequence for the hcGAS protein that was codon-optimized for expression in E. coli. As indicated, a strain was generated as follow (1) strain which comprises the plasmid alone; (2) strain which comprises the p15-ptet-hcGAS and a dapA auxotrophic modification (3) strain which comprises the p15-ptet-hcGAS and a kynurenine consumption circuit (chromosomally integrated kynureninase under control of a constitutive promoter); (4) strain which comprises the p15-ptet-hcGAS and chromosomally integrated kynureninase under control of a constitutive promoter, and an arginine production circuit comprising feedback resistant ArgA under control of the low oxygen inducible FNR promoter, and a deletion in the endogenous or native argR gene. To produce the 2′3′-cGAMP analog, overnight cultures and control strains were grown in LB containing appropriate antibiotic. These were back diluted into M9 minimal media containing 0.5% glucose and appropriate antibiotics. These were grown for two hours before induction with 500 ng/mL of anhydrotetracycline (ATC), then subsequently allowed to incubate a further 2 hours. 1 mL of the culture was removed, centrifuged at 8000×g for 5 minutes and the supernatant discarded. These pellets were then used in quantify the intracellular concentrations of the 2′3′-cGAMP STING agonist by LC/MS.

### DESCRIPTION OF THE EMBODIMENTS

[0172] Certain tumors are particularly difficult to manage using conventional therapies. Hypoxia is a characteristic feature of solid tumors, wherein cancerous cells are present at very low oxygen concentrations. Regions of hypoxia often surround necrotic tissues and develop as solid forms of cancer outgrow their vasculature. When the vascular supply is unable to meet the metabolic demands of the tumor, the tumor's microenvironment becomes oxygen deficient. Multiple areas within tumors contain <1% oxygen, compared to 3-15% oxygen in normal tissues (Vaupel and Hockel, 1995), and avascular regions may constitute 25-75% of the tumor mass (Dang et al., 2001). Approximately 95% of tumors are hypoxic to some degree (Huang et al., 2004). Systemically delivered anticancer agents rely on tumor vasculature for delivery, however, poor vascularization impedes the oxygen supply to rapidly dividing cells, rendering them less sensitive to therapeutics targeting cellular proliferation in poorly vascularized, hypoxic tumor regions. Radiotherapy fails to kill hypoxic cells because oxygen is a required effector of radiation-induced cell death. Hypoxic cells are up to three times more resistant to radiation therapy than cells with normal oxygen levels (Bettegowda et al., 2003; Tiecher, 1995; Wachsberger et al., 2003). For all of these reasons, nonresectable, locally advanced tumors are particularly difficult to manage using conventional therapies.

[0173] In addition to the challenges associated with targeting a hypoxic environment, therapies that specifically target and destroy cancers must recognize differences between normal and malignant tissues, including genetic alterations and pathophysiological changes that lead to heterogeneous masses with areas of hypoxia and necrosis.

[0174] The disclosure relates to genetically engineered microorganisms, e.g., genetically engineered bacteria, pharmaceutical compositions thereof, and methods of modulating or treating cancer. In certain embodiments, the genetically engineered bacteria are capable of targeting cancerous cells. In certain embodiments, the genetically engineered bacteria are capable of targeting cancerous cells, particularly in low-oxygen conditions, such as in hypoxic tumor environments. In certain embodiments, the genetically engineered bacteria are delivered locally to the tumor cells. In certain aspects, the compositions and methods disclosed herein may be used to deliver one or more immune modulators to cancerous cells or produce one or more immune modulators in cancerous cells.

[0175] This disclosure relates to compositions and therapeutic methods for the local and tumor-specific delivery of immune modulators in order to treat cancers. In certain aspects, the disclosure relates to genetically engineered microorganisms that are capable of targeting cancerous cells and producing one or more effector molecules e.g., immune modulators, such as any of the effector molecules provided herein. In certain aspects, the disclosure relates to genetically engineered bacteria that are capable of targeting cancerous cells and producing one or more effector molecules, e.g., immune modulators (s). In certain aspects, the disclosure relates to genetically engineered bacteria that are capable of targeting cancerous cells, particularly in the hypoxic regions of a tumor, and producing one or more effector molecules, e.g., immune modulators (s) under the control of an oxygen level-inducible promoter. In contrast to existing conventional therapies, the hypoxic areas of tumors offer a perfect niche for the growth of anaerobic bacteria, the use of which offers an opportunity for eradication of advanced local tumors in a precise manner, sparing surrounding well-vascularized, normoxic tissue.

[0176] Specifically, in some embodiments, the genetically engineered bacteria are capable of producing one or more immune initiators. In some embodiments the genetically engineered bacteria are capable of producing one or more immune sustainers in combination with one or more immune initiators.

[0177] In some aspects, the disclosure provides a genetically engineered microorganism that is capable of delivering one or more effector molecules, e.g., immune modulators, such as immune initiators and/or immune sustainers to tumor cells or the tumor microenvironment. In some aspects, the disclosure relates to a genetically engineered microorganism that is delivered systemically, e.g., via any of the delivery means described in the present disclosure, and are capable of producing one or more effector molecules, e.g., immune initiators and/or immune sustainers, as described herein. In some aspects, the disclosure relates to a genetically engineered microorganism that is delivered locally, e.g., via local intra-tumoral administration, and are capable of producing one or more effector molecules, e.g., immune initiators and/or immune sustainers. In some aspects, the compositions and methods disclosed herein may be used to deliver one or more effector molecules, e.g., immune initiators and/or immune sustainers selectively to tumor cells, thereby reducing systemic cytotoxicity or systemic immune dysfunction, e.g., the onset of an autoimmune event or other immune-related adverse event.

[0178] In order that the disclosure may be more readily understood, certain terms are first defined. These definitions should be read in light of the remainder of the disclosure and as understood by a person of ordinary skill in the art. Unless defined otherwise, all technical and scientific terms used herein have the same meaning as commonly understood by a person of ordinary skill in the art. Additional definitions are set forth throughout the detailed description.

[0179] The generation of immunity to cancer is a potentially self-propagating cyclic process which has been referred to as the “Cancer-Immunity Cycle” (Chen and Mellman, Oncology Meets Immunology: The Cancer-Immunity Cycle; Immunity (2013) 39:1-10), and which can lead to the broadening and amplification of the T cell response. The cycle is counteracted by inhibitory factors that lead to immune regulatory feedback mechanisms at various steps of the cycle and which can halt the development or limit the immunity.

[0180] The cycle essentially comprises a series of steps which need to occur for an anticancer immune response to be successfully mounted. The cycle includes steps, which must occur for the immune response to be initiated and a second series of events which must occur subsequently, in order for the immune response to be sustained (i.e., allowed to progress and expand and not dampened). These steps have been referred to as the “Cancer-Immunity Cycle” (Chen and Mellman, 2013), and are essentially as follows:

[0181] 1. Release (Oncolysis) and/or Acquisition of Tumor Cell Contents;

[0182] Tumor cells break open and spill their contents, resulting in the release of neoantigens, which are taken up by antigen presentating cells (dendritic cells and macrophages for processing. Alternatively, antigen presenting cells may actively phagocytose tumors cells directly.

[0183] 2. Activation of Antigen Presenting Cells (APC) (Dendritic Cells and Macrophages);

[0184] In addition to the first step described above, the next step must involve release of proinflammatory cytokines or generation of proinflammatory cytokines as a result of release of DAMPs or PAMPs from the dying tumor cells to result in antigen presenting cell activation and subsequently an anticancer T cell response. Antigen presenting cell activation is critical to avoid peripheral tolerance to tumor derived antigens. If properly activated, antigen presenting cells present the previously internalized antigens on their surface in the context of MHCI and MHCII molecules alongside the proper co-stimulatory signals (CD80/86, cytokines, etc.) to prime and activate T cells.

[0185] 3. Priming and Activation of T cells:

[0186] Antigen presentation by DCs and macrophages causes the priming and activation of effector T cell responses against the cancer-specific antigens, which are seen as “foreign” by the immune system. This step is critical to the strength and breadth of the anti-cancer immune response, by determining quantity and quality of T effector cells and contribution of T regulatory cells. Additionally, proper priming of T cells can result in superior memory T cell formation and long lived immunity.

[0187] 4. Trafficking and Infiltration:

[0188] Next, the activated effector T cells must traffic to the tumor and infiltrate the tumor.

[0189] 5. Recognition of cancer cells by T cells and T cell support, and augmentation and expansion of effector T cell responses:

[0190] Once arrived at the tumor site, the T cells can recognize and bind to cancer cells via their T cell receptors (TCR), which specifically bind to their cognate antigen presented within the context of MHC molecules on the cancer cells, and subsequently kill the target cancer cell Killing of the cancer cell releases tumor associated antigens through lysis of tumor cells, and the cycle re-initiates, thereby increasing the volume of the response in subsequent rounds of the cycle. Antigen recognition by either MHC-I or MHC-II restricted T cells can result in additional effector functions, such as the release of chemokines and effector cytokines, further potentiating a robust antitumor response.

[0191] 6. Overcoming immune suppression:

[0192] Finally, overcoming certain deficiencies in the immune response to the cancer and/or overcoming the defense strategy of the cancer, i.e., overcoming the breaks that the cancer employs in fighting the immune response, can be viewed as another critical step in the cycle. In some cases, even though T cell priming and activation has occurred, other immunosuppressive cell subsets are actively recruited and activated to the tumor microenvironement, i.e., regulatory T cells or myloid derived suppressor cells. In other cases, T cells may not receive the right signals to properly home to tumors or may be actively excluded from infiltrating the tumor. Finally, certain mechanisms in the tumor microenvironment exist, which are capable of suppressing or repressing the effector cells that are produced as a result of the cycle. Such resistance mechanisms co-opt immune-inhibitory pathways, often referred to as immune checkpoints, which normally mediate immune tolerance and mitigate cancer tissue damage (see e.g., Pardoll (2012), The blockade of immune checkpoints in cancer immunotherapy; Nature Reviews Cancer volume 12, pages 252-264).

[0193] One important immune-checkpoint receptor is cytotoxic T-lymphocyte-associated antigen 4 (CTLA4), which downmodulates the amplitude of T cell activation. Some immune-checkpoint receptors, such as programmed cell death protein 1 (PD1), limit T cell effector functions within tissues. By upregulating ligands for PD1, tumor cells and antigen presenting cells block antitumor immune responses in the tumor microenvironment. Multiple additional immune-checkpoint receptors and ligands, some of which are selectively upregulated in various types of tumor cells, are prime targets for blockade, particularly in combination with approaches that enhance the initiation or activation of antitumor immune responses.

[0194] Therapies have been developed to promote and support progression through the cancer-immunity cycle at one or more of the 6 steps. These therapies can be broadly classified as therapies that promote initiation of the immune response and therapies that help sustain the immune response.

[0195] As used herein the term “immune initiation” or “initiating the immune response” refers to advancement through the steps which lead to the generation and establishment of an immune response. For example, these steps could include the first three steps of the cancer immunity cycle described above, i.e., the process of antigen aquisition (step (1)), activation of dendritic cells and macrophages (step (2)), and/or the priming and activation of T cells (step (3)).

[0196] As used herein the term “immune sustenance” or “sustaining the immune response” refers to the advancement through steps which ensure the immune response is broadened and strengthened over time and which prevent dampening or suppression of the immune response. For example, these steps could include steps 4 through 6 of the cycle described, i.e., T cell trafficking and tumor infiltration, recognition of cancer cells though TCRs, and overcoming immune suppression, i.e., depletion or inhibition of T regulatory cells and preventing the establishment of other active suppression of the effector response.

[0197] Accordingly, in some embodiments, the genetically engineered bacteria are capable of modulating, e.g., advancing the cancer immunity cycle by modulating, e.g., activating, promoting supporting, one or more of the steps in the cycle. In some embodiments, the genetically engineered bacteria are capable of modulating, e.g., promoting, steps that modulate, e.g., intensify, the initiation of the immune response. In some embodiments, the genetically engineered bacteria are capable of modulating, e.g., boosting, certain steps within the cycle that enhance sustenance of the immune response. In some embodiments, the genetically engineered bacteria are capable of modulating, e.g., intensifying, the initiation of the immune response and modulating, e.g., enhancing, sustenance of the immune response.

[0198] Accordingly, in some embodiments, the genetically engineered bacteria are capable of producing one or more effector molecules, e.g., immune modulators, which modulate, e.g., intensify the initiation of the immune response. Accordingly, in some embodiments, the genetically engineered bacteria are capable of producing one or more effector molecules, e.g., immune modulators, which modulate, e.g., enhance, sustenance of the immune response. Accordingly, in some embodiments, the genetically engineered bacteria are capable of producing one or more effector molecules, e.g., immune modulators, which modulate, e.g., intensify, the initiation of the immune response and one or more one or more effector molecules, e.g., immune modulators, which modulate, e.g., enhance, sustenance of the immune response.

[0199] Accordingly, in some embodiments, the genetically engineered bacteria comprise gene sequences encoding one or more effector molecules, e.g., immune modulators, which modulate, e.g., intensify the initiation of the immune response. Accordingly, in some embodiments, the genetically engineered bacteria comprise gene sequences encoding one or more effector molecules, e g., immune modulators, which modulate, e.g., enhance, sustenance of the immune response. Accordingly, in some embodiments, the genetically engineered bacteria comprise gene sequences encoding one or more effector molecules, e.g., immune modulators, which modulate, e.g., intensify, the initiation of the immune response and one or more one or more effector molecules, e.g., immune modulators, which modulate, e.g., enhance, sustenance of the immune response.

[0200] An“effector”, “effector substance” or “effector molecule” refers to one or more molecules, therapeutic substances, or drugs of interest. In one embodiment, the “effector” is produced by a modified microorganism, e.g., bacteria. In another embodiment, a modified microorganism capable of producing a first effector described herein is administered in combination with a second effector, e.g., a second effector not produced by a modified microorganism but administered before, at the same time as, or after, the administration of the modified microorganism producing the first effector.

[0201] A non-limiting example of such effector or effector molecules are “immune modulators,” which include immune sustainers and/or immune initiators as described herein. In some embodiments, the modified microorganism is capable of producing two or more effector molecules or immune modulators. In some embodiments, the modified microorganism is capable of producing three, four, five, six, seven, eight, nine, or ten effector molecules or immune modulators. In some embodiments, the effector molecule or immune modulator is a therapeutic molecule that is useful for modulating or treating a cancer. In another embodiment, a modified microorganism capable of producing a first immune modulator described herein is administered in combination with a second immune modulator, e.g., a second immune modulator not produced by a modified microorganism but administered before, at the same time as, or after, the administration of the modified microorganism producing the first immune modulator.

[0202] In some embodiments, the effector or immune modulator is a therapeutic molecule encoded by at least one gene. In other embodiments, the effector or immune modulator is a therapeutic molecule produced by an enzyme encoded by at least one gene. In alternate embodiments, the effector molecule or immune modulator is a therapeutic molecule produced by a biochemical or biosynthetic pathway encoded by at least one gene. In another rembodiment, the effector molecule or immune modulator is at least one enzyme of a biochemical, biosynthetic, or catabolic pathway encoded by at least one gene. In some embodiments, the effector molecule or immune modulator may be a nucleic acid molecule that mediates RNA interference, microRNA response or inhibition, TLR response, antisense gene regulation, target protein binding (aptamer or decoy oligos), or gene editing, such as CRISPR interference. Other types of effectors and immune modulators are described and listed herein.

[0203] Non-limiting examples of effector molecules and/or immune modulators include immune checkpoint inhibitors (e.g., CTLA-4 antibodies, PD-1 antibodies, PDL-1 antibodies), cytotoxic agents (e.g., Cly A, FASL, TRAIL, TNFα, immunostimulatory cytokines and co-stimulatory molecules (e.g., OX40 antibody or OX40L, CD28, ICOS, CCL21, IL-2, IL-18, IL-15, IL-12, IFN-gamma, IL-21, TNFs, GM-CSF), antigens and antibodies (e.g., tumor antigens, neoantigens, CtxB-PSA fusion protein, CPV-OmpA fusion protein, NY-ESO-1 tumor antigen, RAF1, antibodies against immune suppressor molecules, anti-VEGF, Anti-CXR4/CXCL12, anti-GLP1, anti-GLP2, anti-galectin1, anti-galectin3, anti-Tie2, anti-CD47, antibodies against immune checkpoints, antibodies against immunosuppressive cytokines and chemokines), DNA transfer vectors (e.g., endostatin, thrombospondin-1, TRAIL, SMAC, Stat3, Bcl2, FLT3L, GM-CSF, IL-12, AFP, VEGFR2), and enzymes (e.g., E. coli CD, HSV-TK), immune stimulatory metabolites and biosynthetic pathway enzymes that produce them (STING agonists, e.g., c-di-AMP, 3′3′-cGAMP, and 2′3′-cGAMP; arginine, tryptophan).

[0204] Effectors may also include enzymes or other polypeptides (such as transporters or regulatory proteins) or other modifications (such as inactivation of certain endogenous genes, e.g., auxotrophies), which result in catabolism of immune suppressive or tumor growth promoting metabolites, such as kynurenine, adenosine and ammonia. Non-limiting examples of kynurenine, adenosine, and ammonia consuming circuits are described herein.

[0205] Immune modulators include, inter alia, immune initiators and immune sustainers.

[0206] As used herein, the term “immune initiator” or “initiator” refers to a class of effectors or molecules, e.g., immune modulators, or substances. Immune initiators may modulate, e.g., intensify or enhance, one or more steps of the cancer immunity cycle, including (1) lysis of tumor cells (oncolysis); (2) activation of APCs (dendritic cells and macrophages); and/or (3) priming and activation of T cells. In one embodiment, an immune initiator may be produced by a modified microorganism, e.g., bacterium, described herein, or may be administered in combination with a modified microorganism of the disclosure. For example, a modified microorganism capable of producing a first immune initiator or immune sustainer described herein is administered in combination with a second immune initiator, e.g., a second immune initiator not produced by a modified microorganism but administered before, at the same time as, or after, the administration of the modified microorganism producing the first immune initiator or immune sustainer. Non-limiting examples of such immune initiators are described in further detail herein.

[0207] In some embodiments, an immune initiator is a therapeutic molecule encoded by at least one gene. Non-limiting examples of such therapeutic molecules are described herein and include, but are not limited to, cytokines, chemokines, single chain antibodies (agonistic or antagonistic), ligands (agonistic or antagonistic), co-stimulatory receptors/ligands and the like. In another embodiment, an immune initiator is a therapeutic molecule produced by an enzyme encoded by at least one gene. Non-limiting examples of such enzymes are described herein and include, but are not limited to, DacA and cGAS, which produce a STING agonist. In another embodiment, an immune initiator is at least one enzyme of a biosynthetic pathway encoded by at least one gene. Non-limiting examples of such biosynthetic pathways are described herein and include, but are not limited to, enzymes involved in the production of arginine. In another embodiment, an immune initiator is at least one enzyme of a catabolic pathway encoded by at least one gene. Non-limiting examples of such catabolic pathways are described herein and include, but are not limited to, enzymes involved in the catabolism of a harmful metabolite. In another embodiment, an immune initiator is at least one molecule produced by at least one enzyme of a biosynthetic pathway encoded by at least one gene. In another embodiment, an immune initiator is a therapeutic molecule produced by metabolic conversion, i.e., the immune initiator is a metabolic converter. In other embodiments, the immune initiator may be a nucleic acid molecule that mediates RNA interference, microRNA response or inhibition, TLR response, antisense gene regulation, target protein binding (aptamer or decoy oligos), gene editing, such as CRISPR interference.

[0208] The term “immune initiator” may also refer to any modifications, such as mutations or deletions, in endogenous genes. In some embodiments, the bacterium is engineered to express the biochemical, biosynthetic, or catabolic pathway. In some embodiments, the bacterium is engineered to produce a second messenger molecule.

[0209] In a broader sense, a microorganism, e.g., bacterium, may be referred to herein as an “immune initiator microorganism” when it is capable of producing an “immune initiator.”

[0210] In specific embodiments, the modified microorganism is capable of producing one or more immune initiators, which modulate, e.g., intensify, one or more of steps (1) lysis of tumor cells and/or uptake of tumor antigens, (2), activation of APCs and/or (3) priming and activation of T cells. In some embodiments, the modified microorganism comprises gene circuitry for the production of one or more immune initiators, which modulate, e.g., intensify, one or more of steps (1) lysis of tumor cells and/or uptake of tumor antigens, (2) activation of APCs and/or (3) priming and activation of T cells. In some embodiments, the genetically engineered bacteria comprise one or more genes encoding one or more immune initiators, which modulate, e.g., intensify, one or more of steps (1) oncolysis and/or uptake of tumor antigens, (2) activation of APCs and/or (3) priming and activation of T cells. Any immune initiator may be combined with one or more additional same or different immune initiator(s), which modulate the same or a different step in the cancer immunity cycle.

[0211] In one embodiment, the modified microorganisms produce one or more immune initiators which modulate oncolysis or tumor antigen uptake (step (1)). Non-limiting examples of immune initiators which modulate antigen acquisition are described herein and known in the art and include but are not limited to lytic peptides, CD47 blocking antibodies, SIRP-alpha and variants, TNFα, IFN-γ and 5FU. In one embodiment, the modified microorganisms produce one or more immune initiators which modulate activation of APCs (step (2)). Non-limiting examples of immune initiators which modulate activation of APCs are described herein and known in the art and include but are not limited to Toll-like receptor agonists, STING agonists, CD40L, and GM-CSF. In one embodiment, the modified microorganisms produce one or more immune initiators which modulate, e.g., enhance, priming and activation of T cells (step (3)). Non-limiting examples of immune initiators which modulate, e.g., enhance, priming and activation of T cells are described herein and known in the art and include but are not limited to an anti-OX40 antibody, OXO40L, an anti-41BB antibody, 41BBL, an anti-GITR antibody, GITRL, anti-CD28 antibody, anti-CTLA4 antibody, anti-PD1 antibody, anti-PDL1 antibody, IL-15, and IL-12, etc.

[0212] As used herein the term “immune sustainer” or “sustainer” refers to a class of effectors or molecules, e.g., immune modulators, or substances. Immune sustainers may modulate, e.g., boost or enhance, one or more steps of the cancer immunity cycle, including (4) trafficking and infiltration; (5) recognition of cancer cells by T cells and T cell support; and/or (6) the ability to overcome immune suppression. In one embodiment, the immune sustainer may be produced by the modified microorganisms, e.g., bacteria, described herein. In another embodiment, an immune sustainer may be administered in combination with a modified microorganism described herein. For example, a modified microorganism capable of producing a first immune initiator or immune sustainer described herein is administered in combination with a second immune sustainer, e.g., a second immune sustainer not produced by a modified microorganism but administered before, at the same time as, or after, the administration of the modified microorganism producing the first immune initiator or immune sustainer.

[0213] In some embodiments, the immune sustainer is a therapeutic molecule encoded by at least one gene. Non-limiting examples of such therapeutic molecules are described herein and include cytokines, chemokines, single chain antibodies (agonistic or antagonistic), ligands (agonistic or antagonistic), and the like. In another embodiment, an immune sustainer is a therapeutic molecule produced by an enzyme encoded by at least one gene. Non-limiting examples of such enzymes are described herein and include, but are not limited to, those described in Table 8. In another embodiment, an immune sustainer is at least one enzyme of a biosynthetic pathway or a catabolic pathway encoded by at least one gene. Non-limiting examples of such biosynthetic pathways are described herein and include, but are not limited to, enzymes involved in the production of arginine; and non-limiting examples of such catabolic pathways are described herein and include, but are not limited to, enzymes involved in the catalysis of kynurenine or enzymes involved in the catalysis of adenosine. In another embodiment, an immune sustainer is at least one molecule produced by at least one enzyme of a biosynthetic, biochemical, or catabolic pathway encoded by at least one gene. In another embodiment, an immune sustainer is a therapeutic molecule produced by metabolic conversion, i.e., the immune initiator is a metabolic converter. In other embodiments, the immune sustainer may be a nucleic acid molecule that mediates RNA interference, microRNA response or inhibition, TLR response, antisense gene regulation, target protein binding (aptamer or decoy oligos), gene editing, such as CRISPR interference.

[0214] In specific embodiments, the modified microorganisms are capable of breaking down a harmful metabolite, e.g., a metabolite which promotes cell division, proliferation, cancer growth and/or suppresses the immune system, e.g., by preventing progression through the cancer immunity cycle. Accordingly, the term “immune sustainer” may also refer to the reduction or elimination of a harmful molecule. In such instances, the term “immune sustainer” may also be used to refer to the one or more enzymes of the catabolic pathway which breaks down the harmful metabolite, which may be encoded by one or more gene(s). The term “immune sustainer” may refer to the circuitry encoding the catabolic enzymes, circuitry for producing the catabolic enzymes, or the catabolic enzymes expressed by the microorganism.

[0215] The term “immune sustainer” may also refer to any modifications, such as mutations or deletions, in endogenous genes. In some embodiments, the microorganism is modified to express the biochemical, biosynthetic, or catabolic pathway. In some embodiments, the microorganism is engineered to produce a second messenger molecule.

[0216] In a broader sense, a microorganism, e.g., bacterium, may be referred to as an “immune sustainer microorganism” when it is capable of producing an “immune sustainer.”

[0217] In some embodiments, the modified microorganisms are capable of producing one or more immune sustainers, which modulate, e.g., boost, one or more of steps (4) T cell trafficking and infiltration, (5) recognition of cancer cells by T cells and/or T cell support and/or (6) the ability to overcome immune suppression. Any immune sustainer may be combined with one or more additional immune sustainer(s), which modulate the same or a different step. In some embodiments, the modified microorganisms comprise gene circuitry for the production of one or more immune sustainers, which modulate, e.g., boost, one or more of steps (4) T cell trafficking and infiltration, (5) recognition of cancer cells by T cells and/or T cell support and/or (6) the ability to overcome immune suppression. In some embodiments, the modified microorganisms comprise one or more genes encoding one or more immune sustainers, which modulate, e.g., boost, one or more of steps (4) T cell trafficking and infiltration, (5) recognition of cancer cells by T cells and/or T cell support and/or (6) the ability to overcome immune suppression.

[0218] In one embodiment, the modified microorganisms produce one or more immune sustainers which modulate T cell trafficking and infiltration (step (4)). Non-limiting examples of immune sustainers which modulate T cell trafficking and infiltration are described herein and known in the art and include, but are not limited to, chemokines such as CXCL9 and CXCL10 or upstream activators which induce the expression of such cytokines. In one embodiment, the modified microorganisms produce one or more immune sustainers which modulate recognition of cancer cells by T cells and T cell support (step (5)). Non-limiting examples of immune sustainers which modulate recognition of cancer cells by T cells and T cell support are described herein and known in the art and include, but are not limited to, anti-PD1/PD-L1 antibodies (antagonistic), anti-CTLA-4 antibodies (antagonistic), kynurenine consumption, adenosine consumption, anti-OX40 antibodies (agonistic), anti-41BB antibodies (agonistic), and anti-GITR antibodies (agonistic). In one embodiment, the modified microorganisms produce one or more immune sustainers which modulate, e.g., enhance, the ability to overcome immune suppression (step (6)). Non-limiting examples of immune sustainers which modulate, e.g., enhance, the ability to overcome immune suppression are described herein and known in the art and include, but are not limited to, IL-15 and IL-12 and variants thereof.

[0219] Any one or more immune initiator(s) may be combined any one or more immune sustainer(s). Accordingly, in some embodiments, the modified microorganisms are capable of producing one or more immune initiators which modulate, e.g., intensify, one or more of steps (1) oncolysis, (2) activation of APCs and/or (3) priming and activation of T cells in combination with one or more immune sustainers, which modulate, e.g., boost, one or more of steps (4) T cell trafficking and infiltration, (5) recognition of cancer cells by T cells and/or T cell support and/or (6) the ability to overcome immune suppression.

[0220] In some embodiments, certain immune modulators act at multiple stages of the cancer immunity cycle, e.g., one or more stages of immune initiation, or one or more of immune sustenance, or at one or more stages of immune initiation and at one o more stages of immune sustenance.

[0221] As used herein a “metabolic conversion” refers to a chemical transformation within the cell, e.g., the bacterial cell, which is the result of an enzyme-catalyzed reaction. The enzyme-catalyze reaction can be either biosynthetic or catabolic in nature.

[0222] As used herein, the term “metabolic converter” refers to a biosynthetic or catabolic circuit, i.e., a circuit which comprises gene(s) encoding one or more enzymes, which catalyze a chemical transformation, i.e., which consume, produce or convert a metabolite. In one embodiment, the gene(s) are non-native genes. In another embodiment, the gene(s) may be encoded by native genes, but the circuit is further modified to comprise one or more non-native genes and/or one or more non-native auxotrophies. In some embodiments, the term “metabolic converter” refers to the at least one molecule produced by the at least one enzyme of a biosynthetic pathway encoded by at least one gene.

[0223] “Metabolic converter” also refers to the biosynthetic or catabolic enzymes encoded by a circuit as well as any modifications, such as mutations or deletions, in endogenous genes. The term “metabolic converter” may also refer to the one or more gene(s) encoding the catabolic enzymes and/or modifications of endogenous genes. For example, a metabolic converter can consume a toxic or immunosuppressive metabolite or produce an anti-cancer metabolite, or both. Non-limiting examples of metabolic converters include kynurenine consumers, adenosine consumers, arginine producers and/or ammonia consumers, i.e., circuitry, which encodes enzymes for the consumption of kynurenine or adenosine or for the production of arginine and/or consumption of ammonia.

[0224] In a broader sense, a microorganism, e.g. bacterium, may be referred to herein as a “metabolic converter microorganism” or “metabolic converter bacterium” when it comprises or is capable of producing a “metabolic converter.”

[0225] As used herein, the term “partial regression” refers to an inhibition of growth of a tumor, and/or the regression of a tumor, e.g., in size, after administration of the modified microorganism(s) and/or immune modulator(s) to a subject having the tumor. In one embodiment, a “partial regression” may refer to a regression of a tumor, e.g., in size, by at least about 5%, at least about 10%, at least about 15%, at least about 20%, at least about 25%, at least about 30%, at least about 40%, at least about 50%, at least about 60%, at least about 70%, at least about 80%, or at least about 90%. In another embodiment, a “partial regression” may refer to a decrease in the size of a tumor by at least about 5%, at least about 10%, at least about 15%, at least about 20%, at least about 25%, at least about 30%, at least about 40%, at least about 50%, at least about 60%, at least about 70%, at least about 75%, at least about 80%, or at least about 90%. In one embodiment, “partial regression” refers to the regression of a tumor, e.g., in size, but wherein the tumor is still detectable in the subject.

[0226] As used herein, the term “complete regression” refers to a complete regression of a tumor, e.g., in size, after administration of the modified microorganism(s) and/or immune modulator(s) to the subject having the tumor. When “complete regression” occurs the tumor is undetectable in the subject

[0227] As used herein, the term “percent response” refers to a percentage of subjects in a population of subjects who exhibit either a partial regression or a complete regression, as defined herein, after administration of a modified microorganism(s) and/or immune modulator(s). For example, in one embodiment, about 5%, about 10%, about 15%, about 20%, about 25%, about 30%, about 35%, about 40%, about 45%, about 50%, about 55%, about 60%, about 65%, about 70%, about 75%, about 80%, about 85%, about 90%, or about 95% of subjects in a population of subjects exhibit a partial response or a complete response.

[0228] As used herein, the term “stable disease” refers to a cancer or tumor that is neither growing nor shrinking “Stable disease” also refers to a disease state where no new tumors have developed, and a cancer or tumor has not spread to any new region or area of the body, e.g., by metastiasis.

[0229] “Intratumoral administration” is meant to include any and all means for microorganism delivery to the intratumoral site and is not limited to intratumoral injection means. Examples of delivery means for the engineered microorganisms is discussed in detail herein.

[0230] “Cancer” or “cancerous” is used to refer to a physiological condition that is characterized by unregulated cell growth. In some embodiments, cancer refers to a tumor. “Tumor” is used to refer to any neoplastic cell growth or proliferation or any pre-cancerous or cancerous cell or tissue. A tumor may be malignant or benign. Types of cancer include, but are not limited to, adrenal cancer, adrenocortical carcinoma, anal cancer, appendix cancer, bile duct cancer, bladder cancer, bone cancer (e.g., Ewing sarcoma tumors, osteosarcoma, malignant fibrous histiocytoma), brain cancer (e.g., astrocytomas, brain stem glioma, craniopharyngioma, ependymoma), bronchial tumors, central nervous system tumors, breast cancer, Castleman disease, cervical cancer, colon cancer, rectal cancer, colorectal cancer, endometrial cancer, esophageal cancer, eye cancer, gallbladder cancer, gastrointestinal cancer, gastrointestinal carcinoid tumors, gastrointestinal stromal tumors, gestational trophoblastic disease, heart cancer, Kaposi sarcoma, kidney cancer, laryngeal cancer, hypopharyngeal cancer, leukemia (e.g., acute lymphoblastic leukemia, acute myeloid leukemia, chronic lymphocytic leukemia, chronic myelogenous leukemia), liver cancer, lung cancer, lymphoma (e.g., AIDS-related lymphoma, Burkitt lymphoma, cutaneous T cell lymphoma, Hodgkin lymphoma, Non-Hodgkin lymphoma, primary central nervous system lymphoma), malignant mesothelioma, multiple myeloma, myelodysplastic syndrome, nasal cavity cancer, paranasal sinus cancer, nasopharyngeal cancer, neuroblastoma, oral cavity cancer, oropharyngeal cancer, osteosarcoma, ovarian cancer, pancreatic cancer, penile cancer, pituitary tumors, prostate cancer, retinoblastoma, rhabdomyosarcoma, rhabdoid tumor, salivary gland cancer, sarcoma, skin cancer (e.g., basal cell carcinoma, melanoma), small intestine cancer, stomach cancer, teratoid tumor, testicular cancer, throat cancer, thymus cancer, thyroid cancer, unusual childhood cancers, urethral cancer, uterine cancer, uterine sarcoma, vaginal cancer, vulvar cancer, Waldenström macroglobulinemia, and Wilms tumor. Side effects of cancer treatment may include, but are not limited to, opportunistic autoimmune disorder(s), systemic toxicity, anemia, loss of appetite, irritation of bladder lining, bleeding and bruising (thrombocytopenia), changes in taste or smell, constipation, diarrhea, dry mouth, dysphagia, edema, fatigue, hair loss (alopecia), infection, infertility, lymphedema, mouth sores, nausea, pain, peripheral neuropathy, tooth decay, urinary tract infections, and/or problems with memory and concentration (National Cancer Institute).

[0231] As used herein, “abscopal” and “abscopal effect” refers to an effect in which localized treatment of a tumor not only shrinks or otherwise affects the tumor being treated, but also shrinks or otherwise affects other tumors outside the scope of the localized treatment. In some embodiments, the genetically engineered bacteria may elicit an abscopal effect. In some embodiments, no abscopal effect is observed upon administration of the genetically engineered bacteria.

[0232] In any of these embodiments in which abscopal effect is observed, timing of tumor growth in a tumor of the same type which is distal to the administration site is delayed by at least about 0 to 2 days, at least about 2 to 4 days, at least about 4 to 6 days, at least about 6 to 8 days, at least about 8 to 10 days, at least about 10 to 12 days, at least about 12 to 14 days, at least about 14 to 16 days, at least about 16 to 18 days, at least about 18 to 20 days, at least about 20 to 25 days, at least about 25 to 30 days, at least about 30 to 35 days of the same type relative to the tumor growth (tumor volume) in a naive animal or subject.

[0233] In any of these embodiments in which an abscopal effect is observed, timing of tumor growth as measured in tumor volume in a distal tumor of the same type is delayed by at least about 0 to 2 weeks, at least about 2 to 4 weeks, at least about 4 to 6 weeks, at least about 6 to 8 weeks, at least about 8 to 10 weeks, at least about 10 to 12 weeks, at least about 12 to 14 weeks, at least about 14 to 16 weeks, at least about 16 to 18 weeks, at least about 18 to 20 weeks, at least about 20 to 25 weeks, at least about 25 to 30 weeks, at least about 30 to 35 weeks, at least about 35 to 40 weeks, at least about 40 to 45 weeks, at least about 45 to 50 weeks, at least about 50 to 55 weeks, at least about 55 to 60 weeks, at least about 60 to 65 weeks, at least about 65 to 70 weeks, at least about 70 to 80 weeks, at least about 80 to 90 weeks, or at least about 90 to 100 in a tumor re-challenge relative to the tumor growth (tumor volume) in a naive animal or subject.

[0234] In any of these embodiments in which abscopal effect is observed, timing of tumor growth as measured in tumor volume in a tumor distal to the administration site of the same type is delayed by at least about 0 to 2 years, at least about 2 to 4 years, at least about 4 to 6 years, at least about 6 to 8 years, at least about 8 to 10 years, at least about 10 to 12 years, at least about 12 to 14 years, at least about 14 to 16 years, at least about 16 to 18 years, at least about 18 to 20 years, at least about 20 to 25 years, at least about 25 to 30 years, at least about 30 to 35 years, at least about 35 to 40 years, at least about 40 to 45 years, at least about 45 to 50 years, at least about 50 to 55 years, at least about 55 to 60 years, at least about 60 to 65 years, at least about 65 to 70 years, at least about 70 to 80 years, at least about 80 to 90 years, or at least about 90 to 100 in a tumor re-challenge relative to the tumor growth (tumor volume) in a naive animal or subject.

[0235] In yet another embodiment, survival rate is at least about 1.0-1.2-fold, at least about 1.2-1.4-fold, at least about 1.4-1.6-fold, at least about 1.6-1.8-fold, at least about 1.8-2-fold, or at least about two-fold greater in a tumor re-challenge as compared to the tumor growth (tumor volume) in a naive subject. In yet another embodiment, survival rate is at least about 2 to 3-fold, at least about 3 to 4-fold, at least about 4 to 5-fold, at least about 5 to 6-fold, at least about 6 to 7-fold, at least about 7 to 8-fold, at least about 8 to 9-fold, at least about 9 to 10-fold, at least about 10 to 15-fold, at least about 15 to 20-fold, at least about 20 to 30-fold, at least about 30 to 40-fold, or at least about 40 to 50-fold, at least about 50 to 100-fold, at least about 100 to 500-hundred-fold, or at least about 500 to 1000-fold greater in a tumor re-challenge as compared to the tumor growth (tumor volume) in a naive subject. In this example, “tumor re-challenge” may also include metastasis formation which may occur in a subject at a certain stage of cancer progression.

[0236] Immunological memory represents an important aspect of the immune response in mammals. Memory responses form the basis for the effectiveness of vaccines against cancer cells. As used herein, the term “immune memory” or “immunological memory” refers to a state in which long-lived antigen-specific lymphocytes are available and are capable of rapidly mounting responses upon repeat exposure to a particular antigen. The importance of immunological memory in cancer immunotherapy is known, and the trafficking properties and long-lasting anti-tumor capacity of memory T cells play a crucial role in the control of malignant tumors and prevention of metastasis or reoccurrence Immunological memory exists for both B lymphocytes and for T cells, and is now believed to exist in a large variety of other immune cells, including NK cells, macrophages, and monocytes. (see e.g., Farber et al., Immunological memory: lessons from the past and a look to the future (Nat. Rev. Immunol. (2016) 16: 124-128). Memory B cells are plasma cells that are able to produce antibodies for a long time. The memory B cell has already undergone clonal expansion and differentiation and affinity maturation, so it is able to divide multiple times faster and produce antibodies with much higher affinity. Memory T cells can be both CD4+ and CD8+. These memory T cells do not require further antigen stimulation to proliferate therefore they do not need a signal via MHC.

[0237] Immunological memory can, for example, be measured in an animal model by re-challenging the animal model upon achievement of complete regression upon treatment with the modified microorganism. The animal is then implanted with cancer cells from the cancer cell line and growth is monitored and compared to an age matched naïve animal of the same type which had not previously been exposed to the tumor. Such a tumor re-challenge is used to demonstrate systemic and long term immunity against tumor cells and may represent the ability to fight off future recurrence or metastasis formation. Such an experiment is described herein using the A20 tumor model in the Examples. Immunological memory would prevent or slow the reoccurrence of the tumor in the re-challenged animal relative to the naïve animal. On a cellular level, formation of immunological memory can be measured by expansion and/or persistence of tumor antigen specific memory or effector memory T cells.

[0238] In some embodiments, immunological memory is achieved in a subject upon administration of the modified microorganisms described herein. In some embodiments, immunological memory is achieved cancer patient upon administration of the modified microorganisms described herein.

[0239] In some embodiments, a complete response is achieved in a subject upon administration of the modified microorganisms described herein. In some embodiments, a complete response is achieved in a cancer patient upon administration of the modified microorganisms described herein.

[0240] In some embodiments, a complete remission is achieved in a subject upon administration of the modified microorganisms described herein. In some embodiments, a complete remission is achieved in a cancer patient upon administration of the modified microorganisms described herein.

[0241] In some embodiments, a partial response is achieved in a subject upon administration of the modified microorganisms described herein. In some embodiments, a partial response is achieved in a cancer patient upon administration of the modified microorganisms described herein.

[0242] In some embodiments, stable disease is achieved in a subject upon administration of the modified microorganisms described herein. In some embodiments, a partial response is achieved in a cancer patient upon administration of the modified microorganisms described herein.

[0243] In some embodiments, a subset of subjects within a group achieves a partial or complete response upon administration of the modified microorganisms described herein. In some embodiments, a subset of patients within a group achieve a partial or complete response upon administration of the modified microorganisms described herein.

[0244] In any of these embodiments in which immunological memory is observed, timing of tumor growth is delayed by at least about 0 to 2 days, at least about 2 to 4 days, at least about 4 to 6 days, at least about 6 to 8 days, at least about 8 to 10 days, at least about 10 to 12 days, at least about 12 to 14 days, at least about 14 to 16 days, at least about 16 to 18 days, at least about 18 to 20 days, at least about 20 to 25 days, at least about 25 to 30 days, at least about 30 to 35 days in a tumor re-challenge relative to the tumor growth (tumor volume) in a naive animal or subject.

[0245] In any of these embodiments in which immunological memory is observed, timing of tumor growth as measured in tumor volume delayed by at least about 0 to 2 weeks, at least about 2 to 4 weeks, at least about 4 to 6 weeks, at least about 6 to 8 weeks, at least about 8 to 10 weeks, at least about 10 to 12 weeks, at least about 12 to 14 weeks, at least about 14 to 16 weeks, at least about 16 to 18 weeks, at least about 18 to 20 weeks, at least about 20 to 25 weeks, at least about 25 to 30 weeks, at least about 30 to 35 weeks, at least about 35 to 40 weeks, at least about 40 to 45 weeks, at least about 45 to 50 weeks, at least about 50 to 55 weeks, at least about 55 to 60 weeks, at least about 60 to 65 weeks, at least about 65 to 70 weeks, at least about 70 to 80 weeks, at least about 80 to 90 weeks, or at least about 90 to 100 in a tumor re-challenge relative to the tumor growth (tumor volume) in a naive animal or subject.

[0246] In any of these embodiments in which immunological memory is observed, timing of tumor growth as measured in tumor volume delayed by at least about 0 to 2 years, at least about 2 to 4 years, at least about 4 to 6 years, at least about 6 to 8 years, at least about 8 to 10 years, at least about 10 to 12 years, at least about 12 to 14 years, at least about 14 to 16 years, at least about 16 to 18 years, at least about 18 to 20 years, at least about 20 to 25 years, at least about 25 to 30 years, at least about 30 to 35 years, at least about 35 to 40 years, at least about 40 to 45 years, at least about 45 to 50 years, at least about 50 to 55 years, at least about 55 to 60 years, at least about 60 to 65 years, at least about 65 to 70 years, at least about 70 to 80 years, at least about 80 to 90 years, or at least about 90 to 100 in a tumor re-challenge relative to the tumor growth (tumor volume) in a naive animal or subject.

[0247] In yet another embodiment, survival rate is at least about 1.0-1.2-fold, at least about 1.2-1.4-fold, at least about 1.4-1.6-fold, at least about 1.6-1.8-fold, at least about 1.8-2-fold, or at least about two-fold greater in a tumor re-challenge as compared to the tumor growth (tumor volume) in a naive subject. In yet another embodiment, survival rate is at least about 2 to 3-fold, at least about 3 to 4-fold, at least about 4 to 5-fold, at least about 5 to 6-fold, at least about 6 to 7-fold, at least about 7 to 8-fold, at least about 8 to 9-fold, at least about 9 to 10-fold, at least about 10 to 15-fold, at least about 15 to 20-fold, at least about 20 to 30-fold, at least about 30 to 40-fold, or at least about 40 to 50-fold, at least about 50 to 100-fold, at least about 100 to 500-hundred-fold, or at least about 500 to 1000-fold greater in a tumor re-challenge as compared to the tumor growth (tumor volume) in a naive subject.

[0248] As used herein, “hot tumors” refer to tumors, which are T cell inflamed, i.e., associated with a high abundance of T cells infiltrating into the tumor. “Cold tumors” are characterized by the absence of effector T cells infiltrating the tumor and are further grouped into “immune excluded” tumors, in which immune cells are attracted to the tumor but cannot infiltrate the tumor microenvironment, and “immune ignored” phenotypes, in which no recruitement of immune cells occurs at all (further reviewed in Van der Woude et al., Migrating into the Tumor: a Roadmap for T Cells. Trends Cancer. 2017 November; 3(11):797-808).

[0249] “Hypoxia” is used to refer to reduced oxygen supply to a tissue as compared to physiological levels, thereby creating an oxygen-deficient environment. “Normoxia” refers to a physiological level of oxygen supply to a tissue. Hypoxia is a hallmark of solid tumors and characterized by regions of low oxygen and necrosis due to insufficient perfusion (Groot et al., 2007).

[0250] As used herein, “payload” refers to one or more molecules of interest to be produced by a genetically engineered microorganism, such as a bacteria or a virus. In some embodiments, the payload is a therapeutic payload, e.g., an effector, or immune modulator, e.g., immune initiator or immune sustainer. In some embodiments, the payload is a regulatory molecule, e.g., a transcriptional regulator such as FNR. In some embodiments, the payload comprises a regulatory element, such as a promoter or a repressor. In some embodiments, the payload comprises an inducible promoter, such as from FNRS. In some embodiments, the payload comprises a repressor element, such as a kill switch. In some embodiments, the payload is encoded by a gene or multiple genes or an operon. In alternate embodiments, the payload is produced by a biosynthetic or biochemical pathway, wherein the biosynthetic or biochemical pathway may optionally be endogenous to the microorganism. In some embodiments, the genetically engineered microorganism comprises two or more payloads.

[0251] As used herein, the term “low oxygen” is meant to refer to a level, amount, or concentration of oxygen (O₂) that is lower than the level, amount, or concentration of oxygen that is present in the atmosphere (e.g., <21% O₂; <160 torr O₂)). Thus, the term “low oxygen condition or conditions” or “low oxygen environment” refers to conditions or environments containing lower levels of oxygen than are present in the atmosphere.

[0252] In some embodiments, the term “low oxygen” is meant to refer to the level, amount, or concentration of oxygen (O₂) found in a mammalian gut, e.g., lumen, stomach, small intestine, duodenum, jejunum, ileum, large intestine, cecum, colon, distal sigmoid colon, rectum, and anal canal. In some embodiments, the term “low oxygen” is meant to refer to a level, amount, or concentration of O₂ that is 0-60 mmHg O₂ (0-60 torr O₂) (e.g., 0, 1, 2, 3, 4, 5, 6, 7, 8, 9, 10, 11, 12, 13, 14, 15, 16, 17, 18, 19, 20, 21, 22, 23, 24, 25, 26, 27, 28, 29, 30, 31, 32, 33, 34, 35, 36, 37, 38, 39, 40, 41, 42, 43, 44, 45, 46, 47, 48, 49, 50, 51, 52, 53, 54, 55, 56, 57, 58, 59, and 60 mmHg O₂), including any and all incremental fraction(s) thereof (e.g., 0.2 mmHg, 0.5 mmHg O₂, 0.75 mmHg O₂, 1.25 mmHg O₂, 2.175 mmHg O₂, 3.45 mmHg O₂, 3.75 mmHg O₂, 4.5 mmHg O₂, 6.8 mmHg O₂, 11.35 mmHg 02, 46.3 mmHg O₂, 58.75 mmHg, etc., which exemplary fractions are listed here for illustrative purposes and not meant to be limiting in any way). In some embodiments, “low oxygen” refers to about 60 mmHg O₂ or less (e.g., 0 to about 60 mmHg O₂). The term “low oxygen” may also refer to a range of O₂ levels, amounts, or concentrations between 0-60 mmHg O₂ (inclusive), e.g., 0-5 mmHg O₂, <1 5 mmHg O₂, 6-10 mmHg, <8 mmHg, 47-60 mmHg, etc. which listed exemplary ranges are listed here for illustrative purposes and not meant to be limiting in any way. See, for example, Albenberg et al., Gastroenterology, 147(5): 1055-1063 (2014); Bergofsky et al., J Clin. Invest., 41(11): 1971-1980 (1962); Crompton et al., J Exp. Biol., 43: 473-478 (1965); He et al., PNAS (USA), 96: 4586-4591 (1999); McKeown, Br. J. Radiol., 87:20130676 (2014) (doi: 10.1259/brj.20130676), each of which discusses the oxygen levels found in the mammalian gut of various species and each of which are incorporated by reference herewith in their entireties.

[0253] In some embodiments, the term “low oxygen” is meant to refer to the level, amount, or concentration of oxygen (O₂) found in a mammalian organ or tissue other than the gut, e.g., urogenital tract, tumor tissue, etc. in which oxygen is present at a reduced level, e.g., at a hypoxic or anoxic level. In some embodiments, “low oxygen” is meant to refer to the level, amount, or concentration of oxygen (O₂) present in partially aerobic, semi aerobic, microaerobic, nonaerobic, microoxic, hypoxic, anoxic, and/or anaerobic conditions. For example, Table 1 summarizes the amount of oxygen present in various organs and tissues. In some embodiments, the level, amount, or concentration of oxygen (O₂) is expressed as the amount of dissolved oxygen (“DO”) which refers to the level of free, non-compound oxygen (O₂) present in liquids and is typically reported in milligrams per liter (mg/L), parts per million (ppm; 1 mg/L=1 ppm), or in micromoles (umole) (1 umole O₂=0.022391 mg/L O₂). Fondriest Environmental, Inc., “Dissolved Oxygen”, Fundamentals of Environmental Measurements, 19 Nov. 2013, www.fondriest.com/environmental-measurements/parameters/water-quality/dissolved-oxygen/>.

[0254] In some embodiments, the term “low oxygen” is meant to refer to a level, amount, or concentration of oxygen (O₂) that is about 6.0 mg/L DO or less, e.g., 6.0 mg/L, 5.0 mg/L, 4.0 mg/L, 3.0 mg/L, 2.0 mg/L, 1.0 mg/L, or 0 mg/L, and any fraction therein, e.g., 3.25 mg/L, 2.5 mg/L, 1.75 mg/L, 1.5 mg/L, 1.25 mg/L, 0.9 mg/L, 0.8 mg/L, 0.7 mg/L, 0.6 mg/L, 0.5 mg/L, 0.4 mg/L, 0.3 mg/L, 0.2 mg/L and 0.1 mg/L DO, which exemplary fractions are listed here for illustrative purposes and not meant to be limiting in any way. The level of oxygen in a liquid or solution may also be reported as a percentage of air saturation or as a percentage of oxygen saturation (the ratio of the concentration of dissolved oxygen (O₂) in the solution to the maximum amount of oxygen that will dissolve in the solution at a certain temperature, pressure, and salinity under stable equilibrium). Well-aerated solutions (e.g., solutions subjected to mixing and/or stirring) without oxygen producers or consumers are 100% air saturated.

[0255] In some embodiments, the term “low oxygen” is meant to refer to 40% air saturation or less, e.g., 40%, 39%, 38%, 37%, 36%, 35%, 34%, 33%, 32%, 31%, 30%, 29%, 28%, 27%, 26%, 25%, 24%, 23%, 22%, 21%, 20%, 19%, 18%, 17%, 16%, 15%, 14%, 13%, 12%, 11%, 10%, 9%, 8%, 7%, 6%, 5%, 4%, 3%, 2%, 1%, and 0% air saturation, including any and all incremental fraction(s) thereof (e.g., 30.25%, 22.70%, 15.5%, 7.7%, 5.0%, 2.8%, 2.0%, 1.65%, 1.0%, 0.9%, 0.8%, 0.75%, 0.68%, 0.5%. 0.44%, 0.3%, 0.25%, 0.2%, 0.1%, 0.08%, 0.075%, 0.058%, 0.04%. 0.032%, 0.025%, 0.01%, etc.) and any range of air saturation levels between 0-40%, inclusive (e.g., 0-5%, 0.05-0.1%, 0.1-0.2%, 0.1-0.5%, 0.5-2.0%, 0-10%, 5-10%, 10-15%, 15-20%, 20-25%, 25-30%, etc.).

[0256] The exemplary fractions and ranges listed here are for illustrative purposes and not meant to be limiting in any way. In some embodiments, the term “low oxygen” is meant to refer to 9% O₂ saturation or less, e.g., 9%, 8%, 7%, 6%, 5%, 4%, 3%, 2%, 1%, 0%, O₂ saturation, including any and all incremental fraction(s) thereof (e.g., 6.5%, 5.0%, 2.2%, 1.7%, 1.4%, 0.9%, 0.8%, 0.75%, 0.68%, 0.5%. 0.44%, 0.3%, 0.25%, 0.2%, 0.1%, 0.08%, 0.075%, 0.058%, 0.04%. 0.032%, 0.025%, 0.01%, etc.) and any range of O₂ saturation levels between 0-9%, inclusive (e.g., 0-5%, 0.05-0.1%, 0.1-0.2%, 0.1-0.5%, 0.5-2.0%, 0-8%, 5-7%, 0.3-4.2% O₂, etc.). The exemplary fractions and ranges listed here are for illustrative purposes and not meant to be limiting in any way.

TABLE 1

| Compartment | Oxygen Tension |
|---|---|
| stomach | ~60 torr (e.g., 58 +/− 15 torr) |
| duodenum and first part of | ~30 torr (e.g., 32 +/− 8 torr); |
| jejunum | ~20% oxygen in ambient air |
| Ileum (mid-small intestine) | ~10 torr; ~6% oxygen in ambient |
| | air (e.g., 11 +/− 3 torr) |
| Distal sigmoid colon | ~3 torr (e.g., 3 +/− 1 torr) |
| colon | <2 torr |
| Lumen of cecum | <1 torr |
| tumor | <32 torr (most tumors are <15 torr) |

[0257] As used herein, the term “gene” or “gene sequence” refers to any sequence expressing a polypeptide or protein, including genomic sequences, cDNA sequences, naturally occurring sequences, artificial sequences, and codon optimized sequences. The term “gene” or “gene sequence” inter alia includes modification of endogenous genes, such as deletions, mutations, and expression of native and non-native genes under the control of a promoter that that they are not normally associated with in nature.

[0258] As used herein the terms “gene cassette” and “circuit” or “circuitry” inter alia refers to any sequence expressing a polypeptide or protein, including genomic sequences, cDNA sequences, naturally occurring sequences, artificial sequences, and codon optimized sequences includes modification of endogenous genes, such as deletions, mutations, and expression of native and non-native genes under the control of a promoter that that they are not normally associated with in nature.

[0259] An antibody generally refers to a polypeptide of the immunoglobulin family or a polypeptide comprising fragments of an immunoglobulin that is capable of noncovalently, reversibly, and in a specific manner binding a corresponding antigen. An exemplary antibody structural unit comprises a tetramer composed of two identical pairs of polypeptide chains, each pair having one “light” (about 25 kD) and one “heavy” chain (about 50-70 kD), connected through a disulfide bond.

[0260] As used herein, the term “antibody” or “antibodies “is meant to encompasses all variations of antibody and fragments thereof that possess one or more particular binding specificities. Thus, the term “antibody” or “antibodies” is meant to include full length antibodies, chimeric antibodies, humanized antibodies, single chain antibodies (ScFv, camelids), Fab, Fab′, multimeric versions of these fragments (e.g., F(ab′)2), single domain antibodies (sdAB, V_{H}H fragments), heavy chain antibodies (HCAb), nanobodies, diabodies, and minibodies. Antibodies can have more than one binding specificity, e.g. be bispecific. The term “antibody” is also meant to include so-called antibody mimetics, i.e., which can specifically bind antigens but do not have an antibody-related structure.

[0261] A “single-chain antibody” or “single-chain antibodies” typically refers to a peptide comprising a heavy chain of an immunoglobulin, a light chain of an immunoglobulin, and optionally a linker or bond, such as a disulfide bond. The single-chain antibody lacks the constant Fc region found in traditional antibodies. In some embodiments, the single-chain antibody is a naturally occurring single-chain antibody, e.g., a camelid antibody. In some embodiments, the single-chain antibody is a synthetic, engineered, or modified single-chain antibody. In some embodiments, the single-chain antibody is capable of retaining substantially the same antigen specificity as compared to the original immunoglobulin despite the addition of a linker and the removal of the constant regions. In some aspects, the single chain antibody can be a “scFv antibody”, which refers to a fusion protein of the variable regions of the heavy (VH) and light chains (VL) of immunoglobulins (without any constant regions), optionally connected with a short linker peptide of ten to about 25 amino acids, as described, for example, in U.S. Pat. No. 4,946,778, the contents of which is herein incorporated by reference in its entirety. The Fv fragment is the smallest fragment that holds a binding site of an antibody, which binding site may, in some aspects, maintain the specificity of the original antibody. Techniques for the production of single chain antibodies are described in U.S. Pat. No. 4,946,778.

[0262] As used herein, the term “polypeptide” includes “polypeptide” as well as “polypeptides,” and refers to a molecule composed of amino acid monomers linearly linked by amide bonds (i.e., peptide bonds). The term “polypeptide” refers to any chain or chains of two or more amino acids, and does not refer to a specific length of the product. Thus, “peptides,” “dipeptides,” “tripeptides, “oligopeptides,” “protein,” “amino acid chain,” or any other term used to refer to a chain or chains of two or more amino acids, are included within the definition of “polypeptide,” and the term “polypeptide” may be used instead of, or interchangeably with any of these terms. The term “polypeptide” is also intended to refer to the products of post-expression modifications of the polypeptide, including but not limited to glycosylation, acetylation, phosphorylation, amidation, derivatization, proteolytic cleavage, or modification by non-naturally occurring amino acids. In some embodiments, the polypeptide is produced by the genetically engineered bacteria of the current invention. A polypeptide of the invention may be of a size of about 3 or more, 5 or more, 10 or more, 20 or more, 25 or more, 50 or more, 75 or more, 100 or more, 200 or more, 500 or more, 1,000 or more, or 2,000 or more amino acids.

[0263] An “isolated” polypeptide or a fragment, variant, or derivative thereof refers to a polypeptide that is not in its natural milieu No particular level of purification is required. Recombinantly produced polypeptides and proteins expressed in host cells, including but not limited to bacterial or mammalian cells, are considered isolated for purposed of the invention, as are native or recombinant polypeptides which have been separated, fractionated, or partially or substantially purified by any suitable technique. Recombinant peptides, polypeptides or proteins refer to peptides, polypeptides or proteins produced by recombinant DNA techniques, i.e. produced from cells, microbial or mammalian, transformed by an exogenous recombinant DNA expression construct encoding the polypeptide. Proteins or peptides expressed in most bacterial cultures will typically be free of glycan. Fragments, derivatives, analogs or variants of the foregoing polypeptides, and any combination thereof are also included as polypeptides. The terms “fragment,” “variant,” “derivative” and “analog” include polypeptides having an amino acid sequence sufficiently similar to the amino acid sequence of the original peptide and include any polypeptides, which retain at least one or more properties of the corresponding original polypeptide. Fragments of polypeptides of the present invention include proteolytic fragments, as well as deletion fragments. Fragments also include specific antibody or bioactive fragments or immunologically active fragments derived from any polypeptides described herein. Variants may occur naturally or be non-naturally occurring. Non-naturally occurring variants may be produced using mutagenesis methods known in the art. Variant polypeptides may comprise conservative or non-conservative amino acid substitutions, deletions or additions.

[0264] Polypeptides also include fusion proteins. As used herein, the term “variant” includes a fusion protein, which comprises a sequence of the original peptide or sufficiently similar to the original peptide. As used herein, the term “fusion protein” refers to a chimeric protein comprising amino acid sequences of two or more different proteins. Typically, fusion proteins result from well known in vitro recombination techniques. Fusion proteins may have a similar structural function (but not necessarily to the same extent), and/or similar regulatory function (but not necessarily to the same extent), and/or similar biochemical function (but not necessarily to the same extent) and/or immunological activity (but not necessarily to the same extent) as the individual original proteins which are the components of the fusion proteins. “Derivatives” include but are not limited to peptides, which contain one or more naturally occurring amino acid derivatives of the twenty standard amino acids. “Similarity” between two peptides is determined by comparing the amino acid sequence of one peptide to the sequence of a second peptide. An amino acid of one peptide is similar to the corresponding amino acid of a second peptide if it is identical or a conservative amino acid substitution. Conservative substitutions include those described in Dayhoff, M. O., ed., The Atlas of Protein Sequence and Structure 5, National Biomedical Research Foundation, Washington, D.C. (1978), and in Argos, EMBO J. 8 (1989), 779-785. For example, amino acids belonging to one of the following groups represent conservative changes or substitutions: −Ala, Pro, Gly, Gln, Asn, Ser, Thr; −Cys, Ser, Tyr, Thr; −Val, Ile, Leu, Met, Ala, Phe; −Lys, Arg, His; −Phe, Tyr, Trp, His; and −Asp, Glu.

[0265] In any of these combination embodiments, the genetically engineered bacteria may comprise gene sequence(s) encoding one or more fusion proteins. In some embodiments, the genetically engineered bacteria comprise gene sequence(s) encoding an effector, e.g., an immune modulator, fused to a stabilizing polypeptide. Such stabilizing polypeptides are known in the art and include Fc proteins. In some embodiments, the fusion proteins encoded by the genetically engineered bacteria are Fc fusion proteins, such as IgG Fc fusion proteins or IgA Fc fusion proteins.

[0266] In some embodiments, an immune modulator, is covalently fused to the stabilizing polypeptide through a peptide linker or a peptide bond. In some embodiments, the stabilizing polypeptide comprises an immunoglobulin Fc polypeptide. In some embodiments, the immunoglobulin Fe polypeptide comprises at least a portion of an immunoglobulin heavy chain CH2 constant region. In some embodiments, the immunoglobulin Fc polypeptide comprises at least a portion of an immunoglobulin heavy chain CH3 constant region. In some embodiments, the immunoglobulin Fc polypeptide comprises at least a portion of an immunoglobulin heavy chain CH1 constant region. In some embodiments, the immunoglobulin Fc polypeptide comprises at least a portion of an immunoglobulin variable hinge region. In some embodiments, the immunoglobulin Fe polypeptide comprises at least a portion of an immunoglobulin variable hinge region, immunoglobulin heavy chain CH2 constant region and an immunoglobulin heavy chain CH3 constant region. The genetically engineered bacterium of any of claims 2-64, and any of claims 112-122, wherein the immunoglobulin Fe polypeptide is a human IgG Fe polypeptide. In some embodiments, the immunoglobulin Fc polypeptide is a human IgG4 Fe polypeptide. In some embodiments, the linker comprises a glycine rich peptide. In some embodiments, the glycine rich peptide comprises the sequence [GlyGlyGlyGlySer]n where n is 1, 2, 3, 4, 5 or 6. In some embodiments, the fusion protein comprises a SIRPα IgG FC fusion polypeptide. In some embodiments, the fusion protein comprises a SIRPα IgG4 Fc polypeptide. In some embodiments, the glycine rich peptide linker comprises the sequence SGGGGSGGGGSGGGGS. In some embodiments, the N terminus of SIRPα is covalently fused to the C terminus of a IgG4 Fc through the peptide linker comprising SGGGGSGGGGSGGGGS.

[0267] In some embodiments, the genetically engineered bacteria comprise one or more gene sequences encoding components of a multimeric polypeptide. In some embodiments, the polypeptide is a dimer. Non-limiting example of a dimeric proteins include cytokines, such as IL-15 (heterodimer). In some embodiments, genetically engineered bacteria comprise one or more gene(s) encoding one or more polypeptides wherein the one or more polypeptides comprise a first monomer and a second monomer. In some embodiments, the first monomer polypeptide is covalently linked to a second monomer polypeptide through a peptide linker or a peptide bond. In some embodiments, the linker comprises a glycine rich peptide. In some embodiments, the first and the second monomer have the same polypeptide sequence. In some embodiments, the first and the second monomer have each have a different polypeptide sequence. In some embodiments, the first monomer is a IL-12 p35 polypeptide and the second monomer is a IL-12 p40 polypeptide. In some embodiments, the linker comprises GGGGSGGGS.

[0268] In some embodiments, the genetically engineered bacteria encode a hIGg4 fusion protein which comprises a hIgG4 portion that has about 80%, 81%, 82%, 83%, 84%, 85%, 86%, 87%, 88%, 89%, 90%, 91%, 92%, 93%, 94%, 95%, 96%, 97%, 98%, or 99% identity with one or more of SEQ ID NO: 1117. In another embodiment, the hIgG4 portion comprises SEQ ID NO: 1117. In yet another embodiment, the hIgG4 portion of the polypeptide expressed by the genetically engineered bacteria consists of SEQ ID NO: 1117.

[0269] In some embodiments, the nucleic acid encoding a fusion protein, such as an hIGg4 fusion protein, comprises a sequence which has at least about 80%, at least about 85%, at least about 90%, at least about 95%, or at least about 99% identity to a SEQ ID NO: 1103. In some embodiments, the nucleic acid encoding a fusion protein, comprises SEQ ID NO: 1103. In some embodiments, nucleic acid portion encoding hIgG4 consists of a SEQ ID NO: 1103.

[0270] In some embodiments, the genetically engineered bacteria encode a fusion protein which comprises a linker portion that has about 80%, 81%, 82%, 83%, 84%, 85%, 86%, 87%, 88%, 89%, 90%, 91%, 92%, 93%, 94%, 95%, 96%, 97%, 98%, or 99% identity with one or more of SEQ ID NO: 1121. In another embodiment, the linker portion comprises SEQ ID NO: 1121. In yet another embodiment, the linker portion of the polypeptide expressed by the genetically engineered bacteria consists of SEQ ID NO: 1121.

[0271] In some embodiments, effector function of an immune modulator can be improved through fusion to another polypeptide that facilitates effector function. A non-limiting example of such a fusion is the fusion of IL-15 to the Sushi domain of IL-15Ralpha, as described herein. In some embodiments, accordingly, a first monomer polypeptide is a IL-15 monomer and the second monomer is a IL-15R alpha sushi domain polypeptide.

[0272] In any of these embodiments and all combination embodiments, the genetically engineered bacteria comprise gene sequence(s) encoding one or more secretion tags described herein. In any of these embodiments, the genetically engineered bacteria comprise one or more mutations in an endogenous membrane associated protein allowing for the diffusible outer membrane phenotype. Suitable outer membrane mutations are described herein.

[0273] As used herein, the term “sufficiently similar” means a first amino acid sequence that contains a sufficient or minimum number of identical or equivalent amino acid residues relative to a second amino acid sequence such that the first and second amino acid sequences have a common structural domain and/or common functional activity. For example, amino acid sequences that comprise a common structural domain that is at least about 45%, at least about 50%, at least about 55%, at least about 60%, at least about 65%, at least about 70%, at least about 75%, at least about 80%, at least about 85%, at least about 90%, at least about 91%, at least about 92%, at least about 93%, at least about 94%, at least about 95%, at least about 96%, at least about 97%, at least about 98%, at least about 99%, or at least about 100%, identical are defined herein as sufficiently similar Preferably, variants will be sufficiently similar to the amino acid sequence of the peptides of the invention. Such variants generally retain the functional activity of the peptides of the present invention. Variants include peptides that differ in amino acid sequence from the native and wt peptide, respectively, by way of one or more amino acid deletion(s), addition(s), and/or substitution(s). These may be naturally occurring variants as well as artificially designed ones.

[0274] As used herein the term “linker”, “linker peptide” or “peptide linkers” or “linker” refers to synthetic or non-native or non-naturally-occurring amino acid sequences that connect or link two polypeptide sequences, e.g., that link two polypeptide domains. As used herein the term “synthetic” refers to amino acid sequences that are not naturally occurring. Exemplary linkers are described herein. Additional exemplary linkers are provided in US 20140079701, the contents of which are herein incorporated by reference in its entirety. In some embodiments, the linker is a glycine rich linker. In some embodiments, the linker is (Gly-Gly-Gly-Gly-Ser)n. In some embodiments, the linker comprises SEQ ID NO: 979.

[0275] As used herein the term “codon-optimized sequence” refers to a sequence, which was modified from an existing coding sequence, or designed, for example, to improve translation in an expression host cell or organism of a transcript RNA molecule transcribed from the coding sequence, or to improve transcription of a coding sequence. Codon optimization includes, but is not limited to, processes including selecting codons for the coding sequence to suit the codon preference of the expression host organism.

[0276] Many organisms display a bias or preference for use of particular codons to code for insertion of a particular amino acid in a growing polypeptide chain. Codon preference or codon bias, differences in codon usage between organisms, is allowed by the degeneracy of the genetic code, and is well documented among many organisms. Codon bias often correlates with the efficiency of translation of messenger RNA (mRNA), which is in turn believed to be dependent on, inter cilia, the properties of the codons being translated and the availability of particular transfer RNA (tRNA) molecules. The predominance of selected tRNAs in a cell is generally a reflection of the codons used most frequently in peptide synthesis. Accordingly, genes can be tailored for optimal gene expression in a given organism based on codon optimization.

[0277] As used herein, the terms “secretion system” or “secretion protein” refers to a native or non-native secretion mechanism capable of secreting or exporting the immune modulator from the microbial, e.g., bacterial cytoplasm. Non-limiting examples of secretion systems for gram negative bacteria include the modified type III flagellar, type I (e.g., hemolysin secretion system), type II, type IV, type V, type VI, and type VII secretion systems, resistance-nodulation-division (RND) multi-drug efflux pumps, various single membrane secretion systems. Non-limiting examples of secretion systems are described herein.

[0278] As used herein, the term “transporter” is meant to refer to a mechanism, e.g., protein or proteins, for importing a molecule into the microorganism from the extracellular milieu.

[0279] The immune system is typically most broadly divided into two categories-innate immunity and adaptive immunity-although the immune responses associated with these immunities are not mutually exclusive. “Innate immunity” refers to non-specific defense mechanisms that are activated immediately or within hours of a foreign agent's or antigen's appearance in the body. These mechanisms include physical barriers such as skin, chemicals in the blood, and immune system cells, such as dendritic cells (DCs), leukocytes, phagocytes, macrophages, neutrophils, and natural killer cells (NKs), that attack foreign agents or cells in the body and alter the rest of the immune system to the presence of the foreign agents. During an innate immune response, cytokines and chemokines are produced which in combination with the presentation of immunological antigens, work to activate adaptive immune cells and initiate a full blown immunologic response. “Adaptive immunity” or “acquired immunity” refers to antigen-specific immune response. The antigen must first be processed or presented by antigen presenting cells (APCs). An antigen-presenting cell or accessory cell is a cell that displays antigens directly or complexed with major histocompatibility complexes (MHCs) on their surfaces. Professional antigen-presenting cells, including macrophages, B cells, and dendritic cells, specialize in presenting foreign antigen to T helper cells in a MHC-II restricted manner, while other cell types can present antigen originating inside the cell to cytotoxic T cells in a MHC-I restricted manner. Once an antigen has been presented and recognized, the adaptive immune system activates an army of immune cells specifically designed to attack that antigen. Like the innate system, the adaptive system includes both humoral immunity components (B lymphocyte cells) and cell-mediated immunity (T lymphocyte cells) components. B cells are activated to secrete antibodies, which travel through the bloodstream and bind to the foreign antigen. Helper T cells (regulatory T cells, CD4+ cells) and cytotoxic T cells (CTL, CD8+ cells) are activated when their T cell receptor interacts with an antigen-bound MHC molecule. Cytokines and co-stimulatory molecules help the T cells mature, which mature cells, in turn, produce cytokines which allows the production of priming and expansion of additional T cells sustaining the response. Once activated, the helper T cells release cytokines which regulate and direct the activity of different immune cell types, including APCs, macrophages, neutrophils, and other lymphocytes, to kill and remove targeted cells. Helper T cells also secrete extra signals that assist in the activation of cytotoxic T cells which also help to sustain the immune response. Upon activation, CTL undergoes clonal selection, in which it gains functions, divides rapidly to produce an army of activated effector cells, and forms long-lived memory T cells ready to rapidly respond to future threats. Activated CTL then travels throughout the body searching for cells that bear that unique MHC Class I and antigen. The effector CTLs release cytotoxins that form pores in the target cell's plasma membrane, causing apoptosis. Adaptive immunity also includes a “memory” that makes future responses against a specific antigen more efficient. Upon resolution of the infection, T helper cells and cytotoxic T cells die and are cleared away by phagocytes, however, a few of these cells remain as memory cells. If the same antigen is encountered at a later time, these memory cells quickly differentiate into effector cells, shortening the time required to mount an effective response.

[0280] An “immune checkpoint inhibitor” or “immune checkpoint” refers to a molecule that completely or partially reduces, inhibits, interferes with, or modulates one or more immune checkpoint proteins. Immune checkpoint proteins regulate T-cell activation or function, and are known in the art. Non-limiting examples include CTLA-4 and its ligands CD 80 and CD86, and PD-1 and its ligands PD-L1 and PD-L2 Immune checkpoint proteins are responsible for co-stimulatory or inhibitory interactions of T-cell responses, and regulate and maintain self-tolerance and physiological immune responses.

[0281] A “co-stimulatory” molecule or “co-stimulator” is an immune modulator that increase or activates a signal that stimulates an immune response or inflammatory response.

[0282] As used herein, a genetically engineered microorganism, e.g., engineered bacterium, or immune modulator that “inhibits” cancerous cells refers to a bacterium or virus or molecule that is capable of reducing cell proliferation, reducing tumor growth, and/or reducing tumor volume by at least about 10% to 20%, 20% to 25%, 25% to 30%, 30% to 40%, 40% to 50%, 50% to 60%, 60% to 70%, 70% to 75%, 75% to 80%, 80% to 85%, 85% to 90%, 90% to 95%, 95% to 99%, or more as compared to control, e.g., an untreated control or an unmodified microorganism of the same subtype under the same conditions.

[0283] As used herein, a genetically engineered microorganism, e.g., engineered bacterium, or immune modulator that “inhibits” a biological molecule, such as an immune modulator, e.g., cytokine, chemokine, immune modulatory metabolite, or any other immune modulatory agent, factor, or molecule, refers to a bacterium or virus or immune modulator that is capable of reducing, decreasing, or eliminating the biological activity, biological function, and/or number of that biological molecule, as compared to control, e.g., an untreated control or an unmodified microorganism of the same subtype under the same conditions.

[0284] As used herein, a genetically engineered microorganism, e.g., engineered bacterium, or immune modulator that “activates” or “stimulates” a biological molecule, e.g., cytokine, chemokine, immune modulatory metabolite, or any other immune modulatory agent, factor, or molecule, refers to a bacterium or virus or immune modulator that is capable of activating, increasing, enhancing, or promoting the biological activity, biological function, and/or number of that biological molecule, as compared to control, e.g., an untreated control or an unmodified microorganism of the same subtype under the same conditions.

[0285] “Bacteria for intratumoral administration” refer to bacteria that are capable of directing themselves to cancerous cells. Bacteria for intratumoral administration may be naturally capable of directing themselves to cancerous cells, necrotic tissues, and/or hypoxic tissues. In some embodiments, bacteria that are not naturally capable of directing themselves to cancerous cells, necrotic tissues, and/or hypoxic tissues are genetically engineered to direct themselves to cancerous cells, necrotic tissues, and/or hypoxic tissues. Bacteria for intratumoral administration may be further engineered to enhance or improve desired biological properties, mitigate systemic toxicity, and/or ensure clinical safety. These species, strains, and/or subtypes may be attenuated, e.g., deleted for a toxin gene. In some embodiments, bacteria for intratumoral administration have low infection capabilities. In some embodiments, bacteria for intratumoral administration are motile. In some embodiments, the bacteria for intratumoral administration are capable of penetrating deeply into the tumor, where standard treatments do not reach. In some embodiments, bacteria for intratumoral administration are capable of colonizing at least 20%, at least 30%, at least 40%, at least 50%, at least 60%, at least 70%, at least 80%, at least 90%, or at least 95% of a malignant tumor. Examples of bacteria for intratumoral administration include, but are not limited to, Bifidobacterium, Caulobacter, Clostridium, Escherichia coli, Listeria, Mycobacterium, Salmonella, Streptococcus, and Vibrio, e.g., Bifidobacterium adolescentis, Bifidobacterium bifidum, Bifidobacterium breve UCC2003, Bifidobacterium infantis, Bifidobacterium longum, Clostridium acetobutylicum, Clostridium butyricum, Clostridium butyricum M-55, Clostridium butyricum miyairi, Clostridium cochlearum, Clostridium felsineum, Clostridium histolyticum, Clostridium multifermentans, Clostridium novyi-NT, Clostridium paraputrificum, Clostridium pasteureanum, Clostridium pectinovorum, Clostridium perfringens, Clostridium roseum, Clostridium sporogenes, Clostridium tertium, Clostridium tetani, Clostridium tyrobutyricum, Corynebacterium parvum, Escherichia coli MG1655, Escherichia coli Nissle 1917, Listeria monocytogenes, Mycobacterium bovis, Salmonella choleraesuis, Salmonella typhimurium, and Vibrio cholera (Cronin et al., 2012; Forbes, 2006; Jain and Forbes, 2001; Liu et al., 2014; Morrissey et al., 2010; Nuno et al., 2013; Patyar et al., 2010; Cronin, et al., Mol Ther 2010; 18:1397-407). In some embodiments, the bacteria for intratumoral administration are non-pathogenic bacteria. In some embodiments, intratumoral administration is done via injection.

[0286] “Microorganism” refers to an organism or microbe of microscopic, submicroscopic, or ultramicroscopic size that typically consists of a single cell. Examples of microorganisms include bacteria, viruses, parasites, fungi, certain algae, protozoa, and yeast. In some aspects, the microorganism is modified (“modified microorganism”) from its native state to produce one or more effectors or immune modulators. In certain embodiments, the modified microorganism is a modified bacterium. In some embodiments, the modified microorganism is a genetically engineered bacterium. In certain embodiments, the modified microorganism is a modified yeast. In other embodiments, the modified microorganism is a genetically engineered yeast.

[0287] As used herein, the term “recombinant microorganism” refers to a microorganism, e.g., bacterial, yeast, or viral cell, or bacteria, yeast, or virus, that has been genetically modified from its native state. Thus, a “recombinant bacterial cell” or “recombinant bacteria” refers to a bacterial cell or bacteria that have been genetically modified from their native state. For instance, a recombinant bacterial cell may have nucleotide insertions, nucleotide deletions, nucleotide rearrangements, and nucleotide modifications introduced into their DNA. These genetic modifications may be present in the chromosome of the bacteria or bacterial cell, or on a plasmid in the bacteria or bacterial cell. Recombinant bacterial cells disclosed herein may comprise exogenous nucleotide sequences on plasmids. Alternatively, recombinant bacterial cells may comprise exogenous nucleotide sequences stably incorporated into their chromosome.

[0288] A “programmed or engineered microorganism” refers to a microorganism, e.g., bacterial, yeast, or viral cell, or bacteria, yeast, or virus, that has been genetically modified from its native state to perform a specific function. Thus, a “programmed or engineered bacterial cell” or “programmed or engineered bacteria” refers to a bacterial cell or bacteria that has been genetically modified from its native state to perform a specific function. In certain embodiments, the programmed or engineered bacterial cell has been modified to express one or more proteins, for example, one or more proteins that have a therapeutic activity or serve a therapeutic purpose. The programmed or engineered bacterial cell may additionally have the ability to stop growing or to destroy itself once the protein(s) of interest have been expressed.

[0289] “Non-pathogenic bacteria” refer to bacteria that are not capable of causing disease or harmful responses in a host. In some embodiments, non-pathogenic bacteria are Gram-negative bacteria. In some embodiments, non-pathogenic bacteria are Gram-positive bacteria. In some embodiments, non-pathogenic bacteria do not contain lipopolysaccharides (LPS). In some embodiments, non-pathogenic bacteria are commensal bacteria. Examples of non-pathogenic bacteria include, but are not limited to certain strains belonging to the genus Bacillus, Bacteroides, Bifidobacterium, Brevibacteria, Clostridium, Enterococcus, Escherichia coli, Lactobacillus, Lactococcus, Saccharomyces, and Staphylococcus, e.g., Bacillus coagulans, Bacillus subtilis, Bacteroides fragilis, Bacteroides subtilis, Bacteroides thetaiotaomicron, Bifidobacterium bifidum, Bifidobacterium infantis, Bifidobacterium lactis, Bifidobacterium longum, Clostridium butyricum, Enterococcus faecium, Escherichia coli Nissle, Lactobacillus acidophilus, Lactobacillus bulgaricus, Lactobacillus casei, Lactobacillus johnsonii, Lactobacillus paracasei, Lactobacillus plantarum, Lactobacillus reuteri, Lactobacillus rhamnosus, Lactococcus lactis, and Saccharomyces boulardii (Sonnenborn et al., 2009; Dinleyici et al., 2014; U.S. Pat. Nos. 6,835,376; 6,203,797; 5,589,168; 7,731,976). Naturally pathogenic bacteria may be genetically engineered to provide reduce or eliminate pathogenicity.

[0290] “Probiotic” is used to refer to live, non-pathogenic microorganisms, e.g., bacteria, which can confer health benefits to a host organism that contains an appropriate amount of the microorganism. In some embodiments, the host organism is a mammal. In some embodiments, the host organism is a human. In some embodiments, the probiotic bacteria are Gram-negative bacteria. In some embodiments, the probiotic bacteria are Gram-positive bacteria. Some species, strains, and/or subtypes of non-pathogenic bacteria are currently recognized as probiotic bacteria. Examples of probiotic bacteria include, but are not limited to certain strains belonging to the genus Bifidobacteria, Escherichia coli, Lactobacillus, and Saccharomyces, e.g., Bifidobacterium bifidum, Enterococcus faecium, Escherichia coli strain Nissle, Lactobacillus acidophilus, Lactobacillus bulgaricus, Lactobacillus paracasei, Lactobacillus plantarum, and Saccharomyces boulardii (Dinleyici et al., 2014; U.S. Pat. Nos. 5,589,168; 6,203,797; 6,835,376). The probiotic may be a variant or a mutant strain of bacterium (Arthur et al., 2012; Cuevas-Ramos et al., 2010; Olier et al., 2012; Nougayrede et al., 2006). Non-pathogenic bacteria may be genetically engineered to enhance or improve desired biological properties, e.g., survivability. Non-pathogenic bacteria may be genetically engineered to provide probiotic properties. Probiotic bacteria may be genetically engineered or programmed to enhance or improve probiotic properties.

[0291] As used herein, an “oncolytic virus “(OV) is a virus having the ability to specifically infect and lyse cancer cells, while leaving normal cells unharmed. Oncolytic viruses of interest include, but are not limited to adenovirus, Coxsackie, Reovirus, herpes simplex virus (HSV), vaccinia, fowl pox, vesicular stomatitis virus (VSV), measles, and Parvovirus, and also includes rabies, west nile virus, New castle disease and genetically modified versions thereof. A non-limiting example of an OV is Talimogene Laherparepvec (T-VEC), the first oncolytic virus to be licensed by the FDA as a cancer therapeutic.

[0292] “Operably linked” refers a nucleic acid sequence, e.g., a gene encoding an enzyme for the production of a STING agonist, e.g., a diadenylate cyclase or a c-di-GAMP synthase, that is joined to a regulatory region sequence in a manner which allows expression of the nucleic acid sequence, e.g., acts in cis. A regulatory region is a nucleic acid that can direct transcription of a gene of interest and may comprise promoter sequences, enhancer sequences, response elements, protein recognition sites, inducible elements, promoter control elements, protein binding sequences, 5′ and 3′ untranslated regions, transcriptional start sites, termination sequences, polyadenylation sequences, and introns.

[0293] An “inducible promoter” refers to a regulatory region that is operably linked to one or more genes, wherein expression of the gene(s) is increased in the presence of an inducer of said regulatory region.

[0294] “Exogenous environmental condition(s)” refer to setting(s) or circumstance(s) under which the promoter described herein is induced. In some embodiments, the exogenous environmental conditions are specific to a malignant growth containing cancerous cells, e.g., a tumor. The phrase “exogenous environmental conditions” is meant to refer to the environmental conditions external to the intact (unlysed) engineered microorganism, but endogenous or native to tumor environment or the host subject environment. Thus, “exogenous” and “endogenous” may be used interchangeably to refer to environmental conditions in which the environmental conditions are endogenous to a mammalian body, but external or exogenous to an intact microorganism cell. In some embodiments, the exogenous environmental conditions are low-oxygen, microaerobic, or anaerobic conditions, such as hypoxic and/or necrotic tissues. Some solid tumors are associated with low intracellular and/or extracellular pH; in some embodiments, the exogenous environmental condition is a low-pH environment. In some embodiments, the genetically engineered microorganism of the disclosure comprise a pH-dependent promoter. In some embodiments, the genetically engineered microorganism of the disclosure comprise an oxygen level-dependent promoter. In some aspects, bacteria have evolved transcription factors that are capable of sensing oxygen levels. Different signaling pathways may be triggered by different oxygen levels and occur with different kinetics. An “oxygen level-dependent promoter” or “oxygen level-dependent regulatory region” refers to a nucleic acid sequence to which one or more oxygen level-sensing transcription factors is capable of binding, wherein the binding and/or activation of the corresponding transcription factor activates downstream gene expression.

[0295] Examples of oxygen level-dependent transcription factors include, but are not limited to, FNR (fumarate and nitrate reductase), ANR, and DNR. Corresponding FNR-responsive promoters, ANR (anaerobic nitrate respiration)-responsive promoters, and DNR (dissimilatory nitrate respiration regulator)-responsive promoters are known in the art (see, e.g., Castiglione et al., 2009; Eiglmeier et al., 1989; Galimand et al., 1991; Hasegawa et al., 1998; Hoeren et al., 1993; Salmon et al., 2003), and non-limiting examples are shown in Table 2.

[0296] In a non-limiting example, a promoter (PfnrS) was derived from the E. coli Nissle fumarate and nitrate reductase gene S (fnrS) that is known to be highly expressed under conditions of low or no environmental oxygen (Durand and Storz, 2010; Boysen et al, 2010). The PfnrS promoter is activated under anaerobic conditions by the global transcriptional regulator FNR that is naturally found in Nissle. Under anaerobic conditions, FNR forms a dimer and binds to specific sequences in the promoters of specific genes under its control, thereby activating their expression. However, under aerobic conditions, oxygen reacts with iron-sulfur clusters in FNR dimers and converts them to an inactive form. In this way, the PfnrS inducible promoter is adopted to modulate the expression of proteins or RNA. PfnrS is used interchangeably in this application as FNRS, fnrs, FNR, P-FNRS promoter and other such related designations to indicate the promoter PfnrS.

TABLE 2
Examples of transcription factors and
responsive genes and regulatory regions

| Transcription | Examples of responsive genes, |
|---|---|
| Factor | promoters, and/or regulatory regions: |
| FNR | nirB, ydfZ, pdhR, focA, ndH, hlyE, narK, |
| | narX, narG, yfiD, tdcD |
| ANR | arcDABC |
| DNR | norb, norC |

[0297] As used herein, a “non-native” nucleic acid sequence refers to a nucleic acid sequence not normally present in a microorganism, e.g., an extra copy of an endogenous sequence, or a heterologous sequence such as a sequence from a different species, strain, or substrain of bacteria or virus, or a sequence that is modified and/or mutated as compared to the unmodified sequence from bacteria or virus of the same subtype. In some embodiments, the non-native nucleic acid sequence is a synthetic, non-naturally occurring sequence (see, e.g., Purcell et al., 2013). The non-native nucleic acid sequence may be a regulatory region, a promoter, a gene, and/or one or more genes in gene cassette. In some embodiments, “non-native” refers to two or more nucleic acid sequences that are not found in the same relationship to each other in nature. The non-native nucleic acid sequence may be present on a plasmid or chromosome. In some embodiments, the genetically engineered bacteria of the disclosure comprise a gene that is operably linked to a directly or indirectly inducible promoter that is not associated with said gene in nature, e.g., an FNR-responsive promoter (or other promoter described herein) operably linked to a gene encoding an immune modulator.

[0298] In one embodiment, the effector, or immune modulator, is a therapeutic molecule encoded by at least one non-native gene. In one embodiment, the effector, or immune modulator, is a therapeutic molecule produced by an enzyme encoded by at least one non-native gene. In one embodiment, the effector, or immune modulator, is at least one enzyme of a biosynthetic pathway encoded by at least one non-native gene. In another embodiment, the effector, or immune modulator, is at least one molecule produced by at least one enzyme of a biosynthetic pathway encoded by at least one non-native gene.

[0299] In one embodiment, the immune initiator is a therapeutic molecule encoded by at least one non-native gene. In one embodiment, the immune initiator is a therapeutic molecule produced by an enzyme encoded by at least one non-native gene. In one embodiment, the immune initiator is at least one enzyme of a biosynthetic pathway encoded by at least one non-native gene. In another embodiment, the immune initiator is at least one molecule produced by at least one enzyme of a biosynthetic pathway encoded by at least one non-native gene.

[0300] In one embodiment, the immune sustainer is a therapeutic molecule encoded by at least one non-native gene. In one embodiment, the immune sustainer is a therapeutic molecule produced by an enzyme encoded by at least one non-native gene. In one embodiment, the immune sustainer is at least one enzyme of a biosynthetic pathway encoded by at least one non-native gene. In another embodiment, the immune sustainer is at least one molecule produced by at least one enzyme of a biosynthetic pathway encoded by at least one non-native gene.

[0301] “Constitutive promoter” refers to a promoter that is capable of facilitating continuous transcription of a coding sequence or gene under its control and/or to which it is operably linked. Constitutive promoters and variants are well known in the art and non-limiting examples of constitutive promoters are described herein and in International Patent Application PCT/US2017/013072, filed Jan. 11, 2017 and published as WO2017/123675, the contents of which is herein incorporated by reference in its entirety. In some embodiments, such promoters are active in vitro, e.g., under culture, expansion and/or manufacture conditions. In some embodiments, such promoters are active in vivo, e.g., in conditions found in the in vivo environment, e.g., the gut and/or the tumor microenvironment.

[0302] As used herein, “stably maintained” or “stable” bacterium or virus is used to refer to a bacterial or viral host cell carrying non-native genetic material, e.g., an immune modulator, such that the non-native genetic material is retained, expressed, and propagated. The stable bacterium or virus is capable of survival and/or growth in vitro, e.g., in medium, and/or in vivo, e.g., in hypoxic and/or necrotic tissues. For example, the stable bacterium or virus may be a genetically engineered bacterium comprising non-native genetic material encoding an immune modulator, in which the plasmid or chromosome carrying the non-native genetic material is stably maintained in the bacterium or virus, such that the immune modulator can be expressed in the bacterium or virus, and the bacterium or virus is capable of survival and/or growth in vitro and/or in vivo.

[0303] As used herein, the terms “modulate” and “treat” and their cognates refer to an amelioration of a cancer, or at least one discernible symptom thereof. In another embodiment, “modulate” and “treat” refer to an amelioration of at least one measurable physical parameter, not necessarily discernible by the patient. In another embodiment, “modulate” and “treat” refer to inhibiting the progression of a cancer, either physically (e.g., stabilization of a discernible symptom), physiologically (e.g., stabilization of a physical parameter), or both. In another embodiment, “modulate” and “treat” refer to slowing the progression or reversing the progression of a cancer. As used herein, “prevent” and its cognates refer to delaying the onset or reducing the risk of acquiring a given cancer.

[0304] Those in need of treatment may include individuals already having a particular cancer, as well as those at risk of having, or who may ultimately acquire the cancer. The need for treatment is assessed, for example, by the presence of one or more risk factors associated with the development of a cancer (e.g., alcohol use, tobacco use, obesity, excessive exposure to ultraviolet radiation, high levels of estrogen, family history, genetic susceptibility), the presence or progression of a cancer, or likely receptiveness to treatment of a subject having the cancer. Cancer is caused by genomic instability and high mutation rates within affected cells. Treating cancer may encompass eliminating symptoms associated with the cancer and/or modulating the growth and/or volume of a subject's tumor, and does not necessarily encompass the elimination of the underlying cause of the cancer, e.g., an underlying genetic predisposition.

[0305] As used herein, the term “conventional cancer treatment” or “conventional cancer therapy” refers to treatment or therapy that is widely accepted and used by most healthcare professionals. It is different from alternative or complementary therapies, which are not as widely used. Examples of conventional treatment for cancer include surgery, chemotherapy, targeted therapies, radiation therapy, tomotherapy, immunotherapy, cancer vaccines, hormone therapy, hyperthermia, stem cell transplant (peripheral blood, bone marrow, and cord blood transplants), photodynamic therapy, therapy, and blood product donation and transfusion.

[0306] As used herein a “pharmaceutical composition” refers to a preparation of genetically engineered microorganism of the disclosure with other components such as a physiologically suitable carrier and/or excipient.

[0307] The phrases “physiologically acceptable carrier” and “pharmaceutically acceptable carrier” which may be used interchangeably refer to a carrier or a diluent that does not cause significant irritation to an organism and does not abrogate the biological activity and properties of the administered bacterial or viral compound. An adjuvant is included under these phrases.

[0308] The term “excipient” refers to an inert substance added to a pharmaceutical composition to further facilitate administration of an active ingredient. Examples include, but are not limited to, calcium bicarbonate, calcium phosphate, various sugars and types of starch, cellulose derivatives, gelatin, vegetable oils, polyethylene glycols, and surfactants, including, for example, polysorbate 20.

[0309] The terms “therapeutically effective dose” and “therapeutically effective amount” are used to refer to an amount of a compound that results in prevention, delay of onset of symptoms, or amelioration of symptoms of a condition, e.g., a cancer. A therapeutically effective amount may, for example, be sufficient to treat, prevent, reduce the severity, delay the onset, and/or reduce the risk of occurrence of one or more symptoms of a disorder associated with cancerous cells. A therapeutically effective amount, as well as a therapeutically effective frequency of administration, can be determined by methods known in the art and discussed below.

[0310] In some embodiments, the term “therapeutic molecule” refers to a molecule or a compound that is results in prevention, delay of onset of symptoms, or amelioration of symptoms of a condition, e.g., a cancer. In some embodiments, a therapeutic molecule may be, for example, a cytokine, a chemokine, a single chain antibody, a ligand, a metabolic converter, e.g., arginine, a kynurnenine consumer, or an adenosine consumer, a T cell co-stimulatory receptor, a T cell co-stimulatory receptor ligand, an engineered chemotherapy, or a lytic peptide, among others.

[0311] The articles “a” and “an,” as used herein, should be understood to mean “at least one,” unless clearly indicated to the contrary.

[0312] The phrase “and/or,” when used between elements in a list, is intended to mean either (1) that only a single listed element is present, or (2) that more than one element of the list is present. For example, “A, B, and/or C” indicates that the selection may be A alone; B alone; C alone; A and B; A and C; B and C; or A, B, and C. The phrase “and/or” may be used interchangeably with “at least one of” or “one or more of” the elements in a list.

### Bacteria

[0313] In one embodiment, the modified microorganism may be a bacterium, e.g., a genetically engineered bacterium. The modified microorganism, or genetically engineered microorganisms, such as the modified bacterium of the disclosure is capable of local and tumor-specific delivery of effectors and/or immune modulators, thereby reducing the systemic cytotoxicity and/or immune dysfunction associated with systemic administration of said molecules. The engineered bacteria may be administered systemically, orally, locally and/or intratumorally. In some embodiments, the genetically engineered bacteria are capable of targeting cancerous cells, particularly in the hypoxic regions of a tumor, and producing an effector molecule, e.g., an immune modulator, e.g., immune stimulator or sustainer provided herein. In some embodiments, the genetically engineered bacterium is bacterium that expresses an effector, e.g., immune modulator, under the control of a promoter that is activated by low-oxygen conditions, e.g., the hypoxic environment of a tumor.

[0314] In some embodiments, the tumor-targeting microorganism is a bacterium that is naturally capable of directing itself to cancerous cells, necrotic tissues, and/or hypoxic tissues. For example, bacterial colonization of tumors may be achieved without any specific genetic modifications in the bacteria or in the host (Yu et al., 2008). In some embodiments, the tumor-targeting bacterium is a bacterium that is not naturally capable of directing itself to cancerous cells, necrotic tissues, and/or hypoxic tissues, but is genetically engineered to do so. In some embodiments, the genetically engineered bacteria spread hematogenously to reach the targeted tumor(s). Bacterial infection has been linked to tumor regression (Hall, 1998; Nauts and McLaren, 1990), and certain bacterial species have been shown to localize to and lyse necrotic mammalian tumors (Jain and Forbes, 2001). Non-limiting examples of tumor-targeting bacteria are shown in Table 3.

TABLE 3
Bacteria with tumor-targeting capability

| Bacterial Strain | See, e.g., |
|---|---|
| Clostridium novyi-NT | Forbes, Neil S. “Profile of a |
| | bacterial tumor killer.” Nature |
| | biotechnology 24.12 (2006): |
| | 1484-1485. |
| Bifidobacterium spp | Liu, Sai, et al. “Tumor-targeting |
| Streptococcus spp | bacterial therapy: A potential treatment |
| Caulobacter spp | for oral cancer.” Oncology letters |
| Clostridium spp | 8.6 (2014): 2359-2366. |
| Escherichia coli MG1655 | Cronin, Michelle, et al. “High |
| Escherichia coli Nissle | resolution in vivo bioluminescent |
| Bifidobacterium breve | imaging for the study of bacterial |
| UCC2003 | tumour targeting.” PloS one 7.1 |
| Salmonella typhimurium | (2012): e30940.; Zhou, et al., Med |
| | Hypotheses. 2011 April; 76(4): |
| | 533-4. doi: 10.1016/j.mehy.2010.12.010. |
| | Epub 2011 Jan. 21; Zhang et al., |
| | Appl Environ Microbiol. 2012 |
| | November; 78(21): 7603-7610; |
| | Danino et al., Science Translational |
| | Medicine, 2015 Vol 7 |
| | Issue 289, pp. 289ra84 |
| Clostridium novyi-NT | Bernardes, Nuno, Ananda M. |
| Bifidobacterium spp | Chakrabarty, and Arsenio M. |
| Mycobacterium bovis | Fialho. “Engineering of bacterial |
| Listeria monocytogenes | strains and their products for |
| Escherichia coli | cancer therapy.” Applied |
| Salmonella spp | microbiology and biotechnology |
| Salmonella typhimurium | 97.12 (2013): 5189-5199. |
| Salmonella choleraesuis | Patyar, S., et al. “Bacteria in |
| Vibrio cholera | cancer therapy: a novel |
| Listeria monocytogenes | experimental strategy.” |
| Escherichia coli | J Biomed Sci 17.1 (2010): 21-30. |
| Bifidobacterium adolescentis | |
| Clostridium acetobutylicum | |
| Salmonella typhimurium | |
| Clostridium histolyticum | |
| Escherichia coli Nissle 1917 | Danino et al. “Programmable |
| | probiotics for detection of cancer in |
| | urine.” Sci Transl Med. 2015 May |
| | 27; 7(289): 289ra84 |

[0315] In some embodiments, the gene of interest is expressed in a bacterium which enhances the efficacy of immunotherapy. Recent studies have suggested that the presence of certain types of gut microbes in mice can enhance the anti-tumor effects of cancer immunotherapy without increasing toxic side effects (M. Vétizou et al., “Anticancer immunotherapy by CTLA-4 blockade relies on the gut microbiota,” Science, doi:10.1126/aad1329, 2015; A. Sivan et al., “Commensal Bifidobacterium promotes antitumor immunity and facilitates anti-PD-L1 efficacy,” Science, doi:0.1126/science.aac4255, 2015). Whether the gut microbial species identified in these mouse studies will have the same effect in people is not clear. Vetizou et al (2015) describe T cell responses specific for Bacteroides thetaiotaomicron or Bacteroides fragilis that were associated with the efficacy of CTLA-4 blockade in mice and in patients. Sivan et al. (2015) illustrate the importance of Bifidobacterium to antitumor immunity and anti-PD-L1 antibody against (PD-1 ligand) efficacy in a mouse model of melanoma. In some embodiments, the bacteria expressing the one or more immune modulators are Bacteroides. In some embodiments, the bacteria expressing the one or more immune modulators are Bifidobacterium. In some embodiments, the bacteria expressing the one or more immune modulators are Escherichia Coli Nissle. In some embodiments, the bacteria expressing the one or more immune modulators are Clostridium novyi-NT. In some embodiments, the bacteria expressing the one or more immune modulators are Clostridium butyricum miyairi.

[0316] In certain embodiments, the modified microorganisms or genetically engineered bacteria are obligate anaerobic bacteria. In certain embodiments, the genetically engineered bacteria are facultative anaerobic bacteria. In certain embodiments, the genetically engineered bacteria are aerobic bacteria. In some embodiments, the genetically engineered bacteria are Gram-positive bacteria and lack LPS. In some embodiments, the genetically engineered bacteria are Gram-negative bacteria. In some embodiments, the genetically engineered bacteria are Gram-positive and obligate anaerobic bacteria. In some embodiments, the genetically engineered bacteria are Gram-positive and facultative anaerobic bacteria. In some embodiments, the genetically engineered bacteria are non-pathogenic bacteria. In some embodiments, the genetically engineered bacteria are commensal bacteria. In some embodiments, the genetically engineered bacteria are probiotic bacteria. In some embodiments, the genetically engineered bacteria are naturally pathogenic bacteria that are modified or mutated to reduce or eliminate pathogenicity. Exemplary bacteria include, but are not limited to, Bacillus, Bacteroides, Bifidobacterium, Brevibacteria, Caulobacter, Clostridium, Enterococcus, Escherichia coli, Lactobacillus, Lactococcus, Listeria, Mycobacterium, Saccharomyces, Salmonella, Staphylococcus, Streptococcus, Vibrio, Bacillus coagulans, Bacillus subtilis, Bacteroides fragilis, Bacteroides subtilis, Bacteroides thetaiotaomicron, Bifidobacterium adolescentis, Bifidobacterium bifidum, Bifidobacterium breve UCC2003, Bifidobacterium infantis, Bifidobacterium lactis, Bifidobacterium longum, Clostridium acetobutylicum, Clostridium butyricum, Clostridium butyricum M-55, Clostridium butyricum miyairi, Clostridium cochlearum, Clostridium felsineum, Clostridium histolyticum, Clostridium multifermentans, Clostridium novyi-NT, Clostridium paraputrificum, Clostridium pasteureanum, Clostridium pectinovorum, Clostridium perfringens, Clostridium roseum, Clostridium sporogenes, Clostridium tertium, Clostridium tetani, Clostridium tyrobutyricum, Corynebacterium parvum, Escherichia coli MG1655, Escherichia coli Nissle 1917, Listeria monocytogenes, Mycobacterium bovis, Salmonella choleraesuis, Salmonella typhimurium, Vibrio cholera, and the bacteria shown in Table 3. In certain embodiments, the genetically engineered bacteria are selected from the group consisting of Enterococcus faecium, Lactobacillus acidophilus, Lactobacillus bulgaricus, Lactobacillus casei, Lactobacillus johnsonii, Lactobacillus paracasei, Lactobacillus plantarum, Lactobacillus reuteri, Lactobacillus rhamnosus, Lactococcus lactis, and Saccharomyces boulardii. In certain embodiments, the genetically engineered bacteria are selected from the group consisting of Bacteroides fragilis, Bacteroides thetaiotaomicron, Bacteroides subtilis, Bifidobacterium bifidum, Bifidobacterium infantis, Bifidobacterium lactis, Clostridium butyricum, Escherichia coli Nissle, Lactobacillus acidophilus, Lactobacillus plantarum, Lactobacillus reuteri, and Lactococcus lactis. In some embodiments, Lactobacillus is used for tumor-specific delivery of one or more immune modulators. Lactobacillus casei injected intravenously has been found to accumulate in tumors, which was enhanced through nitroglycerin (NG), a commonly used NO donor, likely due to the role of NO in increasing the blood flow to hypovascular tumors (Fang et al., 2016 (Methods Mol Biol. 2016; 1409:9-23. Enhancement of Tumor-Targeted Delivery of Bacteria with Nitroglycerin Involving Augmentation of the EPR Effect).

[0317] In some embodiments, the genetically engineered bacteria are obligate anaerobes. In some embodiments, the genetically engineered bacteria are Clostridia and capable of tumor-specific delivery of immune modulators. Clostridia are obligate anaerobic bacterium that produce spores and are naturally capable of colonizing and in some cases lysing hypoxic tumors (Groot et al., 2007). In experimental models, Clostridia have been used to deliver pro-drug converting enzymes and enhance radiotherapy (Groot et al., 2007). In some embodiments, the genetically engineered bacteria is selected from the group consisting of Clostridium novyi-NT, Clostridium histolyticium, Clostridium tetani, Clostridium oncolyticum, Clostridium sporogenes, and Clostridium beijerinckii (Liu et al., 2014). In some embodiments, the Clostridium is naturally non-pathogenic. For example, Clostridium oncolyticum is a pathogenic and capable of lysing tumor cells. In alternate embodiments, the Clostridium is naturally pathogenic but modified to reduce or eliminate pathogenicity. For example, Clostridium novyi are naturally pathogenic, and Clostridium novyi-NT are modified to remove lethal toxins. Clostridium novyi-NT and Clostridium sporogenes have been used to deliver single-chain HIF-1α antibodies to treat cancer and is an “excellent tumor colonizing Clostridium strains” (Groot et al., 2007).

[0318] In some embodiments, the genetically engineered bacteria facultative anaerobes. In some embodiments, the genetically engineered bacteria are Salmonella, e.g., Salmonella typhimurium, and are capable of tumor-specific delivery of immune modulators. Salmonella are non-spore-forming Gram-negative bacteria that are facultative anaerobes. In some embodiments, the Salmonella are naturally pathogenic but modified to reduce or eliminate pathogenicity. For example, Salmonella typhimurium is modified to remove pathogenic sites (attenuated). In some embodiments, the genetically engineered bacteria are Bifidobacterium and capable of tumor-specific delivery of immune modulators. Bifidobacterium are Gram-positive, branched anaerobic bacteria. In some embodiments, the Bifidobacterium is naturally non-pathogenic. In alternate embodiments, the Bifidobacterium is naturally pathogenic but modified to reduce or eliminate pathogenicity. Bifidobacterium and Salmonella have been shown to preferentially target and replicate in the hypoxic and necrotic regions of tumors (Yu et al., 2014).

[0319] In some embodiments, the genetically engineered bacteria are Gram-negative bacteria. In some embodiments, the genetically engineered bacteria are E. coli. For example, E. coli Nissle has been shown to preferentially colonize tumor tissue in vivo following either oral or intravenous administration (Zhang et al., 2012 and Danino et al., 2015). E. coli have also been shown to exhibit robust tumor-specific replication (Yu et al., 2008). In some embodiments, the genetically engineered bacteria are Escherichia coli strain Nissle 1917 (E. coli Nissle), a Gram-negative bacterium of the Enterobacteriaceae family that “has evolved into one of the best characterized probiotics” (Ukena et al., 2007). The strain is characterized by its complete harmlessness (Schultz, 2008), and has GRAS (generally recognized as safe) status (Reister et al., 2014, emphasis added).

[0320] The genetically engineered bacteria of the invention may be destroyed, e.g., by defense factors in tissues or blood serum (Sonnenborn et al., 2009). In some embodiments, the genetically engineered bacteria are administered repeatedly. In some embodiments, the genetically engineered bacteria are administered once.

[0321] In certain embodiments, the effectors and/or immune modulator(s) described herein are expressed in one species, strain, or subtype of genetically engineered bacteria. In alternate embodiments, the effector and/or immune modulator is expressed in two or more species, strains, and/or subtypes of genetically engineered bacteria. One of ordinary skill in the art would appreciate that the genetic modifications disclosed herein may be modified and adapted for other species, strains, and subtypes of bacteria.

[0322] Further examples of bacteria which are suitable are described in International Patent Publication WO/2014/043593, the contents of which is herein incorporated by reference in its entirety. In some embodiments, such bacteria are mutated to attenuate one or more virulence factors.

[0323] In some embodiments, the genetically engineered bacteria of the disclosure proliferate and colonize a tumor. In some embodiments, colonization persists for several days, several weeks, several months, several years or indefinitely. In some embodiments, the genetically engineered bacteria do not proliferate in the tumor and bacterial counts drop off quickly post injection, e.g., less than a week post injection, until no longer detectable.

### Bacteriophages

[0324] In some embodiments, the genetically engineered bacteria of the disclosure comprise one or more lysogenic, dormant, temperate, intact, defective, cryptic, or satellite phage or bacteriocins/phage tail or gene transfer agents in their natural state. In some embodiments, the prophage or bacteriophage exists in all isolates of a particular bacterium of interest. In some embodiments, the bacteria are genetically engineered derivatives of a parental strain comprising one or more of such bacteriophage. In any of the embodiments described herein, the bacteria may comprise one or more modifications or mutations within a prophage or bacteriophage genome which alters the properties or behavior of the bacteriophage. In some embodiments, the modifications or mutations prevent the prophage from entering or completing the lytic process. In some embodiments, the modifications or mutations prevent the phage from infecting other bacteria of the same or a different type. In some embodiments, the modifications or mutations alter the fitness of the bacterial host. In some embodiments, the modifications or mutations no not alter the fitness of the bacterial host. In some embodiments, the modifications or mutations have an impact on the desired effector function, e.g., on levels of expression of the effector molecule, e.g., immune modulator, e.g., immune stimulator or sustainer, of the genetically engineered bacterium. In some embodiments, the modifications or mutations have no impact on the desired function e.g., on levels of expression of the effector molecule or on levels of activity of the effector molecule.

[0325] Phage genome size varies, ranging from the smallest Leuconostoc phage L5 (2,435 bp), ˜11.5 kbp (e.g. Mycoplasma phage P1), ˜21kbp (e.g. Lactococcus phage c2), and ˜30 kbp (e.g. Pasteurella phage F108) to the almost 500 kbp genome of Bacillus megaterium phage G (Hatfull and Hendrix; Bacteriophages and their Genomes, Curr Opin Virol. 2011 Oct. 1; 1(4): 298-303, and references therein). Phage genomes may encode less than 10 genes up to several hundreds of genes. Temperate phages or prophages are typically integrated into the chromosome(s) of the bacterial host, although some examples of phages that are integrated into bacterial plasmids also exist (Little, Loysogeny, Prophage Induction, and Lysogenic Conversion. In: Waldor M K, Friedman D I, Adhya S, editors. Phages Their Role in Bacterial Pathogenesis and Biotechnology. Washington D.C.: ASM Press; 2005. pp. 37-54). In some cases, the phages are always located at the same position within the bacterial host chromosome(s), and this position is specific to each phage, i.e., different phages are located at different positions. Other phages can integrate at numerous different locations.

[0326] Accordingly, the bacteria of the disclosure comprise one or more phages genomes which may vary in length, from at least about 1 bp to 10 kb, from at least about 10 kb to 20 kb, from at least about 20 kb to 30 kb, from at least about 30 kb to 40 kb, from at least about 30 kb to 40 kb, from at least about 40 kb to 50 kb, from at least about 50 kb to 60 kb, from at least about 60 kb to 70 kb, from at least about 70 kb to 80 kb, from at least about 80 kb to 90 kb, from at least about 90 kb to 100 kb, from at least about 100 kb to 120 kb, from at least about 120 kb to 140 kb, from at least about 140 kb to 160 kb, from at least about 160 kb to 180 kb, from at least about 180 kb to 200 kb, from at least about 200 kb to 180 kb, from at least about 160 kb to 250 kb, from at least about 250 kb to 300 kb, from at least about 300 kb to 350 kb, from at least about 350 kb to 400 kb, from at least about 400 kb to 500 kb, from at least about 500 kb to 1000 kb. In one embodiment, the genetically engineered bacteria comprise a bacteriophage genome greater than 1000 kb in length.

[0327] In some embodiments, the bacteria of the disclosure comprise one or more phages genomes, which comprise one or more genes encoding one or more polypeptides. In one embodiment, the genetically engineered bacteria comprise a bacteriophage genome comprising at least about 1 to 5 genes, at least about 5 to 10 genes, at least about 10 to 15 genes, at least about 15 to 20 genes, at least about 20 to 25 genes, at least about 25 to 30 genes, at least about 30 to 35 genes, at least about 35 to 40 genes, at least about 40 to 45 genes, at least about 45 to 50 genes, at least about 50 to 55 genes, at least about 55 to 60 genes, at least about 60 to 65 genes, at least about 65 to 70 genes, at least about 70 to 75 genes, at least about 75 to 80 genes, at least about 80 to 85 genes, at least about 85 to 90 genes, at least about 90 to 95 genes, at least about 95 to 100 genes, at least about 100 to 115 genes, at least about 115 to 120 genes, at least about 120 to 125 genes, at least about 125 to 130 genes, at least about 130 to 135 genes, at least about 135 to 140 genes, at least about 140 to 145 genes, at least about 145 to 150 genes, at least about 150 to 160 genes, at least about 160 to 170 genes, at least about 170 to 180 genes, at least about 180 to 190 genes, at least about 190 to 200 genes, at least about 200 to 300 genes. In one embodiment, the genetically engineered bacteria comprise a bacteriophage genome comprising more than about 300 genes.

[0328] In some embodiments, the phage is always or almost always located at the same location or position within the bacterial host chromosome(s) in a particular species. In some embodiments, the phages are found integrated at different locations within the host chromosome in a particular species. In some embodiments, the phage is located on a plasmid.

[0329] In some embodiments, the prophage may be a defective or a cryptic prophage. Defective prophages can no longer undergo a lytic cycle. Cryptic prophages may not be able to undergo a lytic cycle or never have undergone a lytic cycle (Bobay et al., 2014). In some embodiments, the bacteria comprise one or more satellite phage genomes. Satellite phages are otherwise functional phages that do not carry their own structural protein genes, and have genomes that are configures for encapsulation by the structural proteins of other specific phages (Six and Klug Bacteriophage P4: a satellite virus depending on a helper such as prophage P2, Virology, Volume 51, Issue 2, February 1973, Pages 327-344).

[0330] In some embodiments, the bacteria comprise one or more tailiocins. Many bacteria, both gram positive and gram negative, produce a variety of particles resembling phage tails that are functional without an associated phage head (termed tailiocins), and many of which have been shown to have bacteriocin properties (reviewed in Ghequire and Mot, The Tailocin Tale: Peeling off Phage; Trends in Microbiology, October 2015, Vol. 23, No. 10). Phage tail-like bacteriocins are classified two different families: contractile phage tail-like (R-type) and noncontractile but flexible ones (F-type). In some embodiments, the bacteria comprise one or more gene transfer agents. Gene transfer agents (GTAs) are phage-like elements that are encoded by some bacterial genomes. Although GTAs resemble phages, they lack the hallmark capabilities that define typical phages, and they package random fragments of the host cell DNA and then transfer them horizontally to other bacteria of the same species (reviewed in Lang et al., Gene transfer agents: phage-like elements of genetic exchange, Nat Rev Microbiol. 2012 Jun. 11; 10(7): 472-482). There, the DNA can replace the resident cognate chromosomal region by homologous recombination. However, these particles cannot propagate as viruses, as the vast majority of the particles do not carry the genes that encode the GTA. In some embodiments, the bacteria comprise one or more filamentous virions. Filamentous virions integrate as dsDNA prophages (reviewed in Marvin D A, et al, Structure and assembly of filamentous bacteriophages, Prog Biophys Mol Biol. 2014 April; 114(2):80-122). In any of these embodiments, the bacteria described herein comprising defective or a cryptic prophage, satellite phage genomes, tailiocins, gene transfer agents, filamentous virions, which may comprise one or more modifications or mutations within their sequence.

[0331] Prophages can be either identified experimentally or computationally. The experimental approach involves inducing the host bacteria to release phage particles by exposing them to UV light or other DNA-damaging conditions. However, in some cases, the conditions under which a prophage is induced is unknown, and therefore the absence of plaques in a plaque assay does not necessarily prove the absence of a prophage. Additionally, this approach can show only the existence of viable phages, but will not reveal defective prophages. As such, computational identification of prophages from genomic sequence data has become the most preferred route.

[0332] Co-pending International Patent Application PCT/US18/38840, filed Jun. 21, 2018, herein incorporated by reference in their entireties, provide non-limiting examples of probiotic bacteria which contain number of potential bacteriophages contained in the bacterial genome as determined by Phaster scoring. Phaster scoring is described in detail at phaster.ca and in Zhou, et al. (“PHAST: A Fast Phage Search Tool” Nucl. Acids Res. (2011) 39(suppl 2): W347-W352) and Arndt et al. (Arndt, et al. (2016) PHASTER: a better, faster version of the PHAST phage search tool. Nucleic Acids Res., 2016 May 3). In brief, three methods are applied with different criteria to score for prophage regions (as intact, questionable, or incomplete) within a provided bacterial genome sequence.

[0333] In any of the embodiments described herein, the bacteria described herein may comprise one or more modifications or mutations within an existing prophage or bacteriophage genome. In some embodiments, these modifications alter the properties or behavior of the prophage. In some embodiments, the modifications or mutations prevent the prophage from entering or completing the lytic process. In some embodiments, the modifications or mutations prevent the phage from infecting other bacteria of the same or a different type. In some embodiments, the modifications or mutations alter the fitness of the bacterial host. In some embodiments, the modifications or mutations do not alter the fitness of the bacterial host. In some embodiments, the modifications or mutations have an impact on the desired effector function, e.g., of a genetically engineered bacterium. In some embodiments, the modifications or mutations do not have an impact on the desired effector function, e.g., of a genetically engineered bacterium.

[0334] In some embodiments, the modifications or mutations reduce entry or completion of prophage lytic process at least about 1- to 2-fold, at least about 2- to 3-fold, at least about 3- to 4-fold, at least about 4- to 5-fold, at least about 5- to 10-fold, at least about 10 to 100-fold, at least about 100- to 1000-fold. In some embodiments, the modifications or mutations completely prevent entry or completion of prophage lytic process.

[0335] In some embodiments, the modifications or mutations reduce entry or completion of prophage lytic process by at least about 1% to 10%, at least about 10% to 20%, at least about 20% to 30%, at least about 30% to 40%, at least about 40% to 50%, at least about 50% to 60%, at least about 60% to 70%, at least about 70% to 80%, at least about 80% to 90%, or at least about 90% to 100%.

[0336] In some embodiments, the mutations include one or more deletions within the phage genome sequence. In some embodiments, the mutations include one or more insertions into the phage genome sequence. In some embodiments, an antibiotic cassette can be inserted into one or more positions within the phage genome sequence. In some embodiments, the mutations include one or more substitutions within the phage genome sequence. In some embodiments, the mutations include one or more inversions within the phage genome sequence. In some embodiments, the modifications within the phage genome are combinations of two or more of insertions, deletions, substitutions, or inversions within one or more phage genome genes. In any of the embodiments described herein, the modifications may result in one or more frameshift mutations in one or more genes within the phage genome.

[0337] An any of these embodiments, the mutations can be located within or encompass one or more genes encoding proteins of various functions, e.g., lysis, e.g., proteases or lysins, toxins, antibiotic resistance, translation, structural (e.g., head, tail, collar, or coat proteins)., bacteriophage assembly, recombination (e.g., integrases, invertases, or transposases), or replication (e.g., primases, tRNA related proteins), phage insertion, attachment, packaging, or terminases.

[0338] In some embodiments, described herein genetically engineered bacteria are engineered Escherichia coli strain Nissle 1917 (E. coli Nissle). As described in co-pending International Patent Application PCT/US18/38840, filed Jun. 21, 2018, herein incorporated by reference in their entireties, in more detail herein in the examples, routine testing procedures identified bacteriophage production from Escherichia coli Nissle 1917 (E. coli Nissle) and related engineered derivatives. To determine the source of the bacteriophage, a collaborative bioinformatics assessment of the genomes of E. coli Nissle, and engineered derivatives was conducted to analyze genomic sequences of the strains for evidence of prophages, to assess any identified prophage elements for the likelihood of producing functional phage, to compare any functional phage elements with other known phage identified among bacterial genomic sequences, and to evaluate the frequency with which prophage elements are found in other sequenced Escherichia coli (E. coli) genomes. The assessment tools included phage prediction software (PHAST and PHASTER), SPAdes genome assembler software, software for mapping low-divergent sequences against a large reference genome (BWA MEM), genome sequence alignment software (MUMmer), and the National Center for Biotechnology Information (NCBI) nonredundant database. The assessment results showed that E. coli Nissle and engineered derivatives analyzed contain three candidate prophage elements, with two of the three (Phage 2 and Phage 3) containing most genetic features characteristic of intact phage genomes. Two other possible phage elements were also identified. Of note, the engineered strains did not contain any additional phage elements that were not identified in parental E. coli Nissle, indicating that plaque-forming units produced by these strains originate from one of these endogenous phages (Phage 3). Interestingly, Phage 3 is unique to E. coli Nissle among a collection of almost 6000 sequenced E. coli genomes, although related sequences limited to short regions of homology with other putative prophage elements are found in a small number of genomes. Phage 3, but not any of the other Phage, was found to be inducible and result in bacterial lysis upon induction.

[0339] Prophages are very common among E. coli strains, with E. coli Nissle containing a relatively small number of prophage sequences compared to the average number found in a well-characterized set of sequenced E. coli genomes. As such, prophage presence in the engineered strains is part of the natural state of this species and the prophage features of the engineered strains analyzed were consistent with the progenitor strain, E. coli Nissle.

[0340] In some embodiments, the bacteria described herein may comprise one or more modifications or mutations within the E. coli Nissle Phage 3 genome which alters the properties or behavior of Phage 3. In some embodiments, the modifications or mutations prevent Phage 3 from entering or completing the lytic process. In some embodiments, the modifications or mutations prevent the E. coli Nissle Phage 3 from infecting other bacteria of the same or a different type. In some embodiments, the modifications or mutations improve the fitness of the bacterial host. In some embodiments, the no effect fitness of the bacterial host is observed. In some embodiments, the modifications or mutations have an impact on the desired effector function, e.g., expression of the immune modulator. In some embodiments, no impact on the desired effector function, e.g., expression of the immune modulator, is observed.

[0341] In some embodiments, the mutations introduced into the bacterial chassis include one or more deletions within the E. coli Nissle Phage 3 genome sequence. In some embodiments, the mutations include one or more insertions into the E. coli Nissle Phage 3 genome sequence. In some embodiments, an antibiotic cassette can be inserted into one or more positions within the E. coli Nissle Phage 3 genome sequence. Mutations withing Phage 3 are described in more details in Co-pending U.S. provisional applications 62/523,202 and 62/552,829, herein incorporated by reference in their entireties.

TABLE 4
E. coli Nissle Phage 3 Genome

| | | | | GI | | | SEQ | SEQ |
|---|---|---|---|---|---|---|---|---|
| Description | Position | Length | Orientation | Number | Protein ID | Product | ID NO | ID NO |
| ECOLIN_09965 | 27 . . . 998 | 972 | <= | 660511998 | AID78889.1 | lipid A biosynthesis | 1286 | 1359 |
| | | | | | | (KDO)2-(lauroyl)- | | |
| | | | | | | lipid IVA | | |
| | | | | | | acyltransferase | | |
| ECOLIN_09970 | 1117 . . . 2439 | 1323 | <= | 660511999 | AID78890.1 | peptidase | 1287 | 1360 |
| ECOLIN_09975 | 2455 . . . 3387 | 933 | <= | 660512000 | AID78891.1 | zinc ABC transporter | 1288 | 1361 |
| | | | | | | substrate-binding | | |
| | | | | | | protein | | |
| ECOLIN_09980 | 3466 . . . 4221 | 756 | => | 660512001 | AID78892.1 | zinc ABC transporter | 1289 | 1362 |
| | | | | | | ATPase | | |
| ECOLIN_09985 | 4218 . . . 5003 | 786 | => | 660512002 | AID78893.1 | high-affinity zinc | 1290 | 1363 |
| | | | | | | transporter membrane | | |
| | | | | | | component | | |
| ECOLIN_09990 | 5150 . . . 6160 | 1011 | <= | 660512003 | AID78894.1 | ATP-dependent DNA | 1291 | 1364 |
| | | | | | | helicase RuvB | | |
| ECOLIN_09995 | 6169 . . . 6780 | 612 | <= | 660512004 | AID78895.1 | ATP-dependent DNA | 1292 | 1365 |
| | | | | | | helicase RuvA | | |
| ECOLIN_10000 | 7056 . . . 7658 | 603 | => | 660512005 | AID78896.1 | hypothetical protein | 1293 | 1366 |
| ECOLIN_10005 | 7660 . . . 8181 | 522 | <= | 660512006 | AID78897.1 | Holliday junction | 1294 | 1367 |
| | | | | | | resolvase | | |
| ECOLIN_10010 | 8216 . . . 8956 | 741 | <= | 660512007 | AID78898.1 | hypothetical protein | 1295 | 1368 |
| ECOLIN_10015 | 8985 . . . 9428 | 444 | <= | 660512008 | AID78899.1 | dihydroneopterin | 1296 | 1369 |
| | | | | | | triphosphate | | |
| | | | | | | pyrophosphatase | | |
| ECOLIN_10020 | 9430 . . . 11,202 | 1773 | <= | 660512009 | AID78900.1 | aspartyl-tRNA | 1297 | 1370 |
| | | | | | | synthetase | | |
| ECOLIN_10025 | 11,512 . . . 12,078 | 567 | => | 660512010 | AID78901.1 | hydrolase | 1298 | 1371 |
| ECOLIN_10030 | 12,680 . . . 13,069 | 390 | <= | 660512011 | AID78902.1 | DNA polymerase V | 1299 | 1372 |
| | | | | | | ECOLIN_10030 | | |
| ECOLIN_10035 | 13,148 . . . 13,390 | 243 | => | 660512012 | AID78903.1 | MsgA | 1300 | 1373 |
| ECOLIN_10040 | 13,426 . . . 13,806 | 381 | => | 660512013 | AID78904.1 | hypothetical protein | 1301 | 1374 |
| ECOLIN_10045 | 13,808 . . . 14,251 | 444 | => | 660512014 | AID78905.1 | hypothetical protein | 1302 | 1375 |
| ECOLIN_10050 | 14,223 . . . 14,816 | 594 | <= | 660512015 | AID78906.1 | phage tail protein | 1303 | 1376 |
| ECOLIN_10055 | 14,816 . . . 15,748 | 933 | <= | 660512016 | AID78907.1 | tail protein | 1304 | 1377 |
| ECOLIN_10065 | 16,519 . . . 20,445 | 3927 | <= | 660512017 | AID78908.1 | host specificity | 1305 | 1378 |
| | | | | | | protein | | |
| ECOLIN_10070 | 20,488 . . . 21,105 | 618 | <= | 660512018 | AID78909.1 | tail protein | 1306 | 1379 |
| ECOLIN_10075 | 21,098 . . . 21,817 | 720 | <= | 660512019 | AID78910.1 | peptidase P60 | 1307 | 1380 |
| ECOLIN_10080 | 21,820 . . . 22,557 | 738 | <= | 660512020 | AID78911.1 | hypothetical protein | 1308 | 1381 |
| ECOLIN_10085 | 22,614 . . . 22,952 | 339 | <= | 660512021 | AID78912.1 | tail protein | 1309 | 1382 |
| ECOLIN_10090 | 22,949 . . . 26,086 | 3138 | <= | 660512022 | AID78913.1 | tail protein | 1310 | 1383 |
| ECOLIN_10095 | 26,070 . . . 26,342 | 273 | <= | 660512023 | AID78914.1 | tail protein | 1311 | 1384 |
| ECOLIN_10100 | 26,393 . . . 26,824 | 432 | <= | 660512024 | AID78915.1 | tail protein | 1312 | 1385 |
| ECOLIN_10105 | 26,835 . . . 27,578 | 744 | <= | 660512025 | AID78916.1 | tail fiber protein | 1313 | 1386 |
| ECOLIN_10110 | 27,588 . . . 27,989 | 402 | <= | 660512026 | AID78917.1 | Minor tail protein U | 1314 | 1387 |
| ECOLIN_10115 | 27,986 . . . 28,558 | 573 | <= | 660512027 | AID78918.1 | tail protein | 1315 | 1388 |
| ECOLIN_10120 | 28,574 . . . 28,816 | 243 | <= | 660512028 | AID78919.1 | DNA breaking- | 1316 | 1389 |
| | | | | | | rejoining protein | | |
| ECOLIN_10125 | 28,842 . . . 29,168 | 327 | <= | 660512029 | AID78920.1 | hypothetical protein | 1317 | 1390 |
| ECOLIN_10130 | 29,251 . . . 31,197 | 1947 | <= | 660512030 | AID78921.1 | peptidase S14 | 1318 | 1391 |
| ECOLIN_10135 | 31,211 . . . 32,710 | 1500 | <= | 660512031 | AID78922.1 | capsid protein | 1319 | 1392 |
| ECOLIN_10140 | 32,707 . . . 32,922 | 216 | <= | 660512032 | AID78923.1 | hypothetical protein | 1320 | 1393 |
| ECOLIN_10145 | 32,919 . . . 35,021 | 2103 | <= | 660512033 | AID78924.1 | DNA packaging | 1321 | 1394 |
| | | | | | | protein | | |
| ECOLIN_10150 | 35,021 . . . 35,509 | 489 | <= | 660512034 | AID78925.1 | terminase | 1322 | 1395 |
| ECOLIN_10160 | 35,693 . . . 36,421 | 729 | <= | 660512035 | AID78926.1 | hypothetical protein | 1323 | 1396 |
| ECOLIN_10165 | 36,596 . . . 36,826 | 231 | <= | 660512036 | AID78927.1 | hypothetical protein | 1324 | 1397 |
| ECOLIN_10170 | 36,825 . . . 37,421 | 597 | => | 660512037 | AID78928.1 | hypothetical protein | 1325 | 1398 |
| ECOLIN_10175 | 37,490 . . . 37,687 | 198 | <= | 660512038 | AID78929.1 | hypothetical protein | 1326 | 1399 |
| ECOLIN_10180 | 37,901 . . . 38,380 | 480 | <= | 660512039 | AID78930.1 | hypothetical protein | 1327 | 1400 |
| ECOLIN_10185 | 38,401 . . . 38,949 | 549 | <= | 660512040 | AID78931.1 | lysozyme | 1328 | 1401 |
| ECOLIN_10190 | 38,921 . . . 39,199 | 279 | <= | 660512041 | AID78932.1 | holin | 1329 | 1402 |
| ECOLIN_10195 | 39,345 . . . 40,397 | 1053 | <= | 660512042 | AID78933.1 | DNA adenine | 1330 | 1403 |
| | | | | | | methylase | | |
| ECOLIN_10200 | 40,548 . . . 40,739 | 192 | <= | 660512043 | AID78934.1 | hypothetical protein | 1331 | 1404 |
| ECOLIN_10205 | 40,908 . . . 41,807 | 900 | <= | 660512044 | AID78935.1 | serine protease | 1332 | 1405 |
| ECOLIN_10210 | 41,820 . . . 42,026 | 207 | <= | 660512045 | AID78936.1 | hypothetical protein | 1333 | 1406 |
| ECOLIN_10220 | 42,459 . . . 43,148 | 690 | <= | 660512046 | AID78937.1 | antitermination | 1334 | 1407 |
| | | | | | | protein | | |
| ECOLIN_10225 | 43,170 . . . 44,165 | 996 | <= | 660512047 | AID78938.1 | hypothetical protein | 1335 | 1408 |
| ECOLIN_10230 | 44,162 . . . 44,845 | 684 | <= | 660512048 | AID78939.1 | antirepressor | 1336 | 1409 |
| ECOLIN_10235 | 44,859 . . . 45,245 | 387 | <= | 660512049 | AID78940.1 | crossover junction | 1337 | 1410 |
| | | | | | | endodeoxyribonuclease | | |
| ECOLIN_10240 | 45,242 . . . 46,561 | 1320 | <= | 660512050 | AID78941.1 | adenine | 1338 | 1411 |
| | | | | | | methyltransferase, | | |
| | | | | | | DNA | | |
| | | | | | | methyltransferase | | |
| | | | | | | ECOLIN_10240 | | |
| ECOLIN_10245 | 46,558 . . . 47,439 | 882 | <= | 660512051 | AID78942.1 | GntR family | 1339 | 1412 |
| | | | | | | transcriptional | | |
| | | | | | | regulator | | |
| | | | | | | ECOLIN_10245 | | |
| ECOLIN_10250 | 47,449 . . . 47,787 | 339 | <= | 660512052 | AID78943.1 | hypothetical protein | 1340 | 1413 |
| ECOLIN_10255 | 47,784 . . . 48,347 | 564 | <= | 660512053 | AID78944.1 | hypothetical protein, | 1341 | 1414 |
| | | | | | | completely unknown | | |
| ECOLIN_10260 | 48,379 . . . 48,636 | 258 | <= | 660512054 | AID78945.1 | hypothetical protein, | 1342 | 1415 |
| | | | | | | cI repressor | | |
| | | | | | | ECOLIN_10260 | | |
| ECOLIN_10265 | 48,715 . . . 49,425 | 711 | => | 660512055 | AID78946.1 | hypothetical protein, | 1343 | 1416 |
| | | | | | | Domain of unknown | | |
| | | | | | | function (DUF4222); | | |
| | | | | | | This short protein is | | |
| | | | | | | likely to be of phage | | |
| | | | | | | origin. For example it | | |
| | | | | | | is found in | | |
| | | | | | | Enterobacteria phage | | |
| | | | | | | YYZ-2008. It is | | |
| | | | | | | largely found in | | |
| | | | | | | enteric bacteria. The | | |
| | | | | | | molecular function of | | |
| | | | | | | this protein is | | |
| | | | | | | unknown. | | |
| ECOLIN_10270 | 49,868 . . . 50,065 | 198 | <= | 660512056 | AID78947.1 | hypothetical protein | 1344 | 1417 |
| ECOLIN_10275 | 50,378 . . . 51,295 | 918 | => | 660512057 | AID78948.1 | DNA recombinase In | 1345 | 1418 |
| | | | | | | Escherichia coli, | | |
| | | | | | | RdgC is required for | | |
| | | | | | | growth in | | |
| | | | | | | recombination- | | |
| | | | | | | deficient | | |
| | | | | | | exonuclease-depleted | | |
| | | | | | | strains. Under these | | |
| | | | | | | conditions, RdgC | | |
| | | | | | | may act as an | | |
| | | | | | | exonuclease to | | |
| | | | | | | remove collapsed | | |
| | | | | | | replication forks, in | | |
| | | | | | | the absence of the | | |
| | | | | | | normal repair | | |
| | | | | | | mechanisms | | |
| | | | | | | ECOLIN_10275 | | |
| ECOLIN_10280 | 51,404 . . . 51,943 | 540 | => | 660512058 | AID78949.1 | hypothetical protein, | 1346 | 1419 |
| | | | | | | 5′ Deoxynucleotidase | | |
| | | | | | | YfbR and HD | | |
| | | | | | | superfamily | | |
| | | | | | | hydrolases | | |
| | | | | | | ECOLIN_10280 | | |
| ECOLIN_10290 | 52,104 . . . 52,358 | 255 | => | 660512059 | AID78950.1 | hypothetical protein | 1347 | 1420 |
| | | | | | | Multiple Antibiotic | | |
| | | | | | | Resistance Regulator | | |
| | | | | | | (MarR) family of | | |
| | | | | | | transcriptional | | |
| | | | | | | regulators | | |
| ECOLIN_10295 | 52,355 . . . 52,702 | 348 | => | 660512060 | AID78951.1 | hypothetical protein, | 1348 | 1421 |
| | | | | | | unknown ead like | | |
| | | | | | | protein in P22 | | |
| ECOLIN_10300 | 52,704 . . . 53,012 | 309 | => | 660512061 | AID78952.1 | hypothetical protein, | 1349 | 1422 |
| | | | | | | totally unknown | | |
| ECOLIN_10305 | 53,026 . . . 53,493 | 468 | => | 660512062 | AID78953.1 | hypothetical protein, | 1350 | 1423 |
| | | | | | | Protein of unknown | | |
| | | | | | | function (DUF550); | | |
| | | | | | | This family is found | | |
| | | | | | | in a range of | | |
| | | | | | | Proteobacteria and a | | |
| | | | | | | few P-22 dsDNA | | |
| | | | | | | virus particles. The | | |
| | | | | | | function is currently | | |
| | | | | | | not known. Similar to | | |
| | | | | | | P22 EA gene | | |
| | | | | | | ECOLIN_10305 | | |
| ECOLIN_10310 | 53,496 . . . 53,750 | 255 | => | 660512063 | AID78954.1 | hypothetical protein, | 1351 | 1424 |
| | | | | | | Phage repressor | | |
| | | | | | | protein C, contains | | |
| | | | | | | Cro/C1-type HTH | | |
| | | | | | | and peptisase s24 | | |
| | | | | | | domains | | |
| ECOLIN_10315 | 53,772 . . . 54,341 | 570 | => | 660512064 | AID78955.1 | hypothetical protein, | 1352 | 1425 |
| | | | | | | 3′-5′ exonuclease | | |
| | | | | | | ECOLIN_10315 | | |
| ECOLIN_10320 | 54,382 . . . 54,618 | 237 | => | 660512065 | AID78956.1 | excisionase | 1353 | 1426 |
| | | | | | | ECOLIN_10320 | | |
| ECOLIN_10325 | 54,677 . . . 55,990 | 1314 | => | 660512066 | AID78957.1 | integrase, Phage | 1354 | 1427 |
| | | | | | | integrase family; | | |
| | | | | | | Members of this | | |
| | | | | | | family cleave DNA | | |
| | | | | | | substrates by a series | | |
| | | | | | | of staggered XerC | | |
| ECOLIN_10330 | 56,017 . . . 56,742 | 726 | => | 660512067 | AID78958.1 | hypothetical protein | 1355 | 1428 |
| ECOLIN_10335 | 56,795 . . . 57,190 | 396 | => | 660512068 | AID78959.1 | membrane protein | 1356 | 1429 |
| ECOLIN_10340 | 57,231 . . . 57,974 | 744 | => | 660512069 | AID78960.1 | tRNA | 1357 | 1430 |
| | | | | | | methyltransferase | | |
| ECOLIN_10345 | 57,971 . . . 58,942 | 972 | => | 660512070 | AID78961.1 | tRNA | 1358 | 1431 |
| | | | | | | methyltransferase | | |

[0342] In one specific embodiment, at least about 9000 to 10000 bp of the E. coli Nissle Phage 3 genome are mutated, e.g., in one example, 9687 bp of the E. coli Nissle Phage 3 genome are deleted.

[0343] In any of the embodiments described herein, the modifications encompass are located in one or more genes selected from ECOLIN_09965, ECOLIN_09970, ECOLIN_09975, ECOLIN_09980, ECOLIN_09985, ECOLIN_09990, ECOLIN_09995, ECOLIN_10000, ECOLIN_10005, ECOLIN_10010, ECOLIN_10015, ECOLIN_10020, ECOLIN_10025, ECOLIN_10030, ECOLIN_10035, ECOLIN_10040, ECOLIN_10045, ECOLIN_10050, ECOLIN_10055, ECOLIN_10065, ECOLIN_10070, ECOLIN_10075, ECOLIN_10080, ECOLIN_10085, ECOLIN_10090, ECOLIN_10095, ECOLIN_10100, ECOLIN_10105, ECOLIN_10110, ECOLIN_10115, ECOLIN_10120, ECOLIN_10125, ECOLIN_10130, ECOLIN_10135, ECOLIN_10140, ECOLIN_10145, ECOLIN_10150, ECOLIN_10160, ECOLIN_10165, ECOLIN_10170, ECOLIN_10175, ECOLIN_10180, ECOLIN_10185, ECOLIN_10190, ECOLIN_10195, ECOLIN_10200, ECOLIN_10205, ECOLIN_10210, ECOLIN_10220, ECOLIN_10225, ECOLIN_10230, ECOLIN_10235, ECOLIN_10240, ECOLIN_10245, ECOLIN_10250, ECOLIN_10255, ECOLIN_10260, ECOLIN_10265, ECOLIN_10270, ECOLIN_10275, ECOLIN_10280, ECOLIN_10290, ECOLIN_10295, ECOLIN_10300, ECOLIN_10305, ECOLIN_10310, ECOLIN_10315, ECOLIN_10320, ECOLIN_10325, ECOLIN_10330, ECOLIN_10335, ECOLIN_10340, and ECOLIN_10345.

[0344] In one embodiment, the mutation is a complete or partial deletion of one or more of ECOLIN_10110, ECOLIN_10115, ECOLIN_10120, ECOLIN_10125, ECOLIN_10130, ECOLIN_10135, ECOLIN_10140, ECOLIN_10145, ECOLIN_10150, ECOLIN_10160, ECOLIN_10165, ECOLIN_10170, and ECOLIN_10175. In one specific embodiment, the mutation is a complete or partial deletion of ECOLIN_10110, ECOLIN_10115, ECOLIN_10120, ECOLIN_10125, ECOLIN_10130, ECOLIN_10135, ECOLIN_10140, ECOLIN_10145, ECOLIN_10150, ECOLIN_10160, ECOLIN_10165, and ECOLIN_10170, and ECOLIN_10175. In one specific embodiment, the mutation is a complete deletion of ECOLIN_10110, ECOLIN_10115, ECOLIN_10120, ECOLIN_10125, ECOLIN_10130, ECOLIN_10135, ECOLIN_10140, ECOLIN_10145, ECOLIN_10150, ECOLIN_10160, ECOLIN_10165, and ECOLIN_10170, and a deletion mutation of ECOLIN_10175. In one embodiment, the phage genome mutation or deletion is located at one or more positions within SEQ ID NO: 1285. In some embodiments, at least about 0-1%, 1%-10%, 10% to 20%, 20% to 30%, 30% to 40%, 40% to 50%, 50% to 60%, 60% to 70%, 70% to 80%, 80% to 90% of SEQ ID NO: 1432 is deleted from the phage genome. In some embodiments, at least about 91%, at least about 92%, at least about 93%, at least about 94%, at least about 95%, at least about 96%, at least about 97%, at least about 98%, at least about 99% or at least about 100% of SEQ ID NO: 1432 is deleted from the phage genome. In some embodiments, at least about 99%, 98%, 97%, 96%, 95%, 94%, 93%, 92%, 91% or 90% of SEQ ID NO: 1432 is deleted from the phage genome. In one embodiment, a sequence comprising SEQ ID NO: 1432 is deleted from the phage 3 genome. In one embodiment, the sequence of SEQ ID NO: 1432 is deleted from the Phage 3 genome. In one embodiments, the genetically engineered bacteria comprise modified phage genome sequence comprising SEQ ID NO: 1433. In one embodiments, the genetically engineered bacteria comprise modified phage genome sequence consisting of SEQ ID NO: 1433.

### Effector Molecules

### Oncolysis and Activation of an Innate Immune Response

[0345] In certain embodiments, the effector molecule(s), or immune modulators(s) of the disclosure generates an innate antitumor immune response. In certain embodiments, the immune modulators(s) of the disclosure generates a local antitumor immune response. In some aspects, the effector molecule, or immune modulator, is able to activate systemic antitumor immunity against distant cancer cells. In certain embodiments, the immune modulators(s) generates a systemic or adaptive antitumor immune response. In some embodiments, the immune modulators(s) result in long-term immunological memory. Examples of suitable immune modulators(s), e.g., immune initiators and/or immune sustainers are described herein.

[0346] In some embodiments, one or more immune modulators may be produced by a modified microorganism described herein. In other embodiments, one or more immune modulators may be administered in combination with a modified microorganism capable of producing a second immune modulator(s). For example, one or more immune initiators may be administered in combination with a modified microorganism capable of producing one or more immune sustainers. In another embodiment, one or more immune sustainers may be administered in combination with a modified microorganism capable of producing one or more immune initiators. Alternatively, one or more first immune initiators may be administered in combination with a modified microorganism capable of producing one or more second immune initiators. Alternatively, one or more first immune sustainers may be administered in combination with a modified microorganism capable of producing one or more second immune sustainers.

[0347] Many immune cells found in the tumor microenvironment express pattern recognition receptors (PRRs), which receptors play a key role in the innate immune response through the activation of pro-inflammatory signaling pathways, stimulation of phagocytic responses (macrophages, neutrophils and dendritic cells) or binding to micro-organisms as secreted proteins. PRRs recognize two classes of molecules: (PAMPs), which are associated with microbial pathogens, and damage-associated molecular patterns (DAMPs), which are associated with cell components that are released during cell damage, death stress, or tissue injury. PAMPS are unique to each pathogen and are essential molecular structures required for the pathogens survival, e.g., bacterial cell wall molecules (e.g. lipoprotein), viral capsid proteins, and viral and bacterial DNA. PRRs can identify a variety of microbial pathogens, including bacteria, viruses, parasites, fungi, and protozoa. PRRs are primarily expressed by cells of the innate immune system, e.g., antigen presenting macrophage and dendritic cells, but can also be expressed by other cells (both immune and non-immune cells), and are either localized on the cell surface to detect extracellular pathogens or within the endosomes and cellular matrix where they detect intracellular invading viruses.

[0348] Examples of PRRs include Toll-like receptors (TLR), which are type 1 transmembrane receptors that have an extracellular domain which detects infecting pathogens. TLR1, 2, 4, and 6 recognize bacterial lipids, TLR3, 7 and 8 recognize viral RNA, TLR9 recognizes bacterial DNA, and TLR5 and 10 recognize bacterial or parasite proteins. Other examples of PRRs include C-type lectin receptors (CLR), e.g., group I mannose receptors and group II asialoglycoprotein receptors, cytoplasmic (intracellular) PRRs, nucleotide oligomerization (NOD)-like receptors (NLRs), e.g., NOD1 and NOD2, retinoic acid-inducible gene I (RIG-I)-like receptors (RLR), e.g., RIG-I, MDA5, and DDX3, and secreted PRRs, e.g., collectins, pentraxins, ficolins, lipid transferases, peptidoglycan recognition proteins (PGRs) and the leucine-rich repeat receptor (LRR).

[0349] PRRs initiate the activation of signaling pathways, such as the NF-kappa B pathway, that stimulates the production of co-stimulatory molecules and pro-inflammatory cytokines, e.g., type I IFNs, IL-6, TNF, and IL-12, which mechanisms play a role in the activation of inflammatory and immune responses mounted against infectious pathogens. Such response triggers the activation of immune cells present in the tumor microenvironment that are involved in the adaptive immune response (e.g., antigen-presenting cells (APCs) such as B cells, DCs, TAMs, and other myeloid derived suppressor cells). Recent evidence indicates that immune mechanisms activated by PAMPs and DAMPs play a role in activating immune responses against tumor cells as well (LeMercier et al., Canc Res, 73:4629-40 (2013); Kim et al., Blood, 119:355-63 (2012)).

[0350] Another PRR subfamily are the RIG-I-like receptors (RLRs) which are considered to be sensors of double-stranded viral RNA upon viral infection and which can be targeted for intratumoral immune stimulation. Upon stimulation, for example, upon intratumoral delivery of an oncolytic virus, RLRs trigger the release of type I IFNs by the host cell and result in its death by apoptosis. Such cytokine and tumor-associated antigen (TAA) release also results in the activation of the antitumor immune response. Given that RLRs are endogenously expressed in all tumor types, they are a universal proimmunogenic therapeutic target and of particular relevance in the immune response generated by local delivery of an oncolytic virus.

[0351] In some aspects, the bacterial chassis itself may activate one or more of the PRR receptors, e.g., TLRs or RIGI, and stimulate an innate immune response. In some aspects the PRRs, e.g., TLRs or RIGI, are activated by one or more immune modulators produced by the genetically engineered bacteria.

### Lytic Peptides

[0352] The bacteria of the present disclosure, by themselves, may result in cell lysis at the tumor site due to the presence of PAMPs and DAMPs, which will initiate an innate immune response. In addition, some bacteria have the added feature of being lytic microorganisms with the ability to lyse tumor cells. Thus, in some embodiments, the engineered microorganisms, produce natural or native lytic peptides. In some embodiments, the bacteria can be further engineered to produce one or more cytotoxic molecules, e.g., lytic peptides that have the ability to lyse cancer or tumor cells locally in the tumor microenvironment upon delivery to the tumor site. Upon cell lysis, the tumor cells release tumor-associated antigens that serve to promote an adaptive immune response. The presence of PAMPs and DAMPs promote the maturation of antigen-presenting cells, such as dendritic cells, which activate antigen-specific CD4+ and CD8+ T cell responses. Thus, in some embodiments, the genetically engineered bacteria are capable of producing one or more cytotoxin(s). In some embodiments, the genetically engineered bacteria or are capable of producing one or more lytic peptide molecule(s) Exemplary lytic peptide and cytotoxins which may be produced by the genetically engineered bacteria and how they may be expressed, induced and regulated, are described in International Patent Application PCT/US2017/013072, filed Jan. 11, 2017, published as WO2017/123675, and PCT/US2018/012698, filed Jan. 1, 2018, the contents of each of which is herein incorporated by reference in its entirety.

[0353] In any of these embodiments, the genetically engineered bacteria comprising gene sequence(s) encoding lytic peptides further comprise gene sequence(s) encoding one or more further effector molecule(s), i.e., therapeutic molecule(s) or a metabolic converter(s). In any of these embodiments, the circuit encoding lytic peptides may be combined with a circuit encoding one or more immune initiators or immune sustainers as described herein, in the same or a different bacterial strain (combination circuit or mixture of strains). The circuit encoding the immune initiators or immune sustainers may be under the control of a constitutive or inducible promoter, e.g., low oxygen inducible promoter or any other constitutive or inducible promoter described herein. In any of these embodiments, the gene sequence(s) encoding lytic peptides may be combined with gene sequence(s) encoding one or more STING agonist producing enzymes, as described herein, in the same or a different bacterial strain (combination circuit or mixture of strains). In some embodiments, the gene sequences which are combined with the gene sequence(s) encoding lytic peptides encode DacA. DacA may be under the control of a constitutive or inducible promoter, e.g., low oxygen inducible promoter such as FNR or any other constitutive or inducible promoter described herein. In some embodiments, the dacA gene is integrated into the chromosome. In some embodiments, the gene sequences which are combined with the gene sequence(s) encoding lytic peptides encode cGAS. cGAS may be under the control of a constitutive or inducible promoter, e.g., low oxygen inducible promoter such as FNR or any other constitutive or inducible promoter described herein. In some embodiments, the gene encoding cGAS is integrated into the chromosome. In any of these combination embodiments, the bacteria may further comprise an auxotrophic modification, e.g., a mutation or deletion in DapA, ThyA, or both. In any of these embodiments, the bacteria may further comprise a phage modification, e.g., a mutation or deletion, in an endogenous prophage as described herein.

### Antigens/Vaccines

[0354] By introducing tumor antigens, e.g., tumor-specific antigens, tumor-associated antigens (TAA(s)), and/or neoantigen(s) to the local tumor environment, an immune response can be raised against the particular cancer or tumor cell of interest known to be associated with that neoantigen. As used herein the term “tumor antigen” is meant to refer to tumor-specific antigens, tumor-associated antigens (TAAs), and neoantigens. As used herein, tumor antigen also includes “Oncogenic viral antigens”, Oncofetal antigens, tissue differentiation antigens, and cancer-testis antigens. The engineered microorganisms can be engineered such that the peptides, e.g. tumor antigens, can be anchored in the microbial cell wall (e.g., at the microbial cell surface). Thus, in some embodiments, the genetically engineered bacteria, are engineered to produce one or more tumor antigens. Non-limiting examples of such tumor antigens which may be produced by the bacteria of the disclosure described e.g., in International Patent Application PCT/US2017/013072, filed Jan. 11, 2017, published as WO2017/123675, and PCT/US2018/012698, filed Jan. 1, 2018, the contents of each of which is herein incorporated by reference in its entirety or otherwise known in the art.

[0355] In any of these embodiments, the genetically engineered bacteria comprising gene sequence(s) encoding antigens further comprise gene sequence(s) encoding one or more further effector molecule(s), i.e., therapeutic molecule(s) or a metabolic converter(s). In any of these embodiments, the circuit encoding antigens may be combined with a circuit encoding one or more immune initiators or immune sustainers as described herein, in the same or a different bacterial strain (combination circuit or mixture of strains). The circuit encoding the immune initiators or immune sustainers may be under the control of a constitutive or inducible promoter, e.g., low oxygen inducible promoter or any other constitutive or inducible promoter described herein. In any of these embodiments, the gene sequence(s) encoding antigens may be combined with gene sequence(s) encoding one or more STING agonist producing enzymes, as described herein, in the same or a different bacterial strain (combination circuit or mixture of strains). In some embodiments, the gene sequences which are combined with the gene sequence(s) encoding antigens encode DacA. DacA may be under the control of a constitutive or inducible promoter, e.g., low oxygen inducible promoter such as FNR or any other constitutive or inducible promoter described herein. In some embodiments, the dacA gene is integrated into the chromosome. In some embodiments, the gene sequences which are combined with the gene sequence(s) encoding antigens encode cGAS. cGAS may be under the control of a constitutive or inducible promoter, e.g., low oxygen inducible promoter such as FNR or any other constitutive or inducible promoter described herein. In some embodiments, the gene encoding cGAS is integrated into the chromosome. In any of these combination embodiments, the bacteria may further comprise an auxotrophic modification, e.g., a mutation or deletion in DapA, ThyA, or both. In any of these embodiments, the bacteria may further comprise a phage modification, e.g., a mutation or deletion, in an endogenous prophage as described herein.

### Prodrugs

[0356] Prodrug therapy provides less reactive and cytotoxic form of anticancer drugs. In some embodiments, the genetically engineered bacteria are capable of converting a prodrug into its active form. One example of a suitable prodrug system is the 5-FC/5-FU system.

[0357] The cytotoxic and radiosensitizing agent 5-fluorouracil (5-FU) is used in the treatment of many cancers including gastrointestinal, breast, head and neck and colorectal cancers (Duivenvorrden et al., 2006, Sensitivity of 5-fluorouracil-resistant cancer cells to adenovirus suicide gene therapy; Cancer Gene Therapy (2006) 14, 57-65). However, toxicity limits its administration at higher concentrations. In order to achieve higher concentrations at the tumor with less toxicity, a prodrug system was developed. Cytosine deaminase deaminates the prodrug 5-fluorocytosine (5-FC) into 5-FU. 5-FC can be introduced at relatively high concentrations, allowing the 5-FU generated at the tumor site to achieve concentrations that are higher than can be systemically administered safely. At the tumor site 5-FU is then transformed by cellular enzymes to potent pyrimidine antimetabolites, 5-FdUMP, 5-FdUTP and 5-FUTP. These metabolites act as metabolic blockers that inhibit thymidylate synthetase, which converts ribonucleotides to deoxyribonucleotides, thus inhibiting DNA synthesis ((Horani et al. 2015, Anticancer Prodrugs—Three Decades Of Design; wjpps; Volume 4, Issue 07, 1751-1779, and references therein).

[0358] This system has been further improved by the inclusion of the UPRT that converts 5-FU to 5-fluorouridine monophosphate, the first step of its pathway to activation, similar to the actions of the mammalian orotate phosphoribosyltransferase (Tiraby et al., 1998; Concomitant expression of E. coli cytosine deaminase and uracil phosphoribosyltransferase improves the cytotoxicity of 5-fluorocytosine. FEMS Microbiol Lett 1998; 176: 41-49).

[0359] In some embodiments, the genetically engineered bacteria are capable of converting 5-FC to 5FU. In some embodiments, the genetically engineered bacteria are capable of converting 5-FC to 5FU in the tumor microenvironment. In some embodiments, 5-FC is administered systemically. In some embodiments, 5-FC is administered orally, intravenously, or subcutaneously. In some embodiments, 5-FC is administered via intratumor injection. the genetically engineered bacteria comprise gene sequences encoding a cytosine deaminase (EC 3.5.4.1)

[0360] In some embodiments, the cytosine deaminase is from E. coli. In some embodiments, the cytosine deaminase is codA. In some embodiments, the genetically engineered bacteria express cytosine deaminase from yeast. In some embodiments, the genetically engineered bacteria express a codA-upp fusion protein.

[0361] Non-limiting examples of cytosine deaminases suitable for heterologous expression in the genetically engineered bacteria include Photobacterium leiognathi subsp. mandapamensis svers.1.1. (PMSV_1378), Pseudomonas mendocina NK-01 (MDS_1548), Streptomyces coelicolor A3(2) (SC04634), Achromobacter xylosoxidans AXX-A (AXXA_10715, AXXA_16292), Gluconacetobacter sp. SXCC-1 (CODA), Gallibacterium anatis UMN179 (UMN179_00049), Klebsiella oxytoca KCTC 1686 (KOX_14050, KOX_04555), Taylorella asinigenitalis MCE3 (TASI_1310), Rhodococcus jostii RHA1 (RHA1_R000599, RHA1_R000597), Enterobacter aerogenes KCTC 2190 (EAE_13265, EAE_05115), Candidatus Arthromitus sp. SFB-mouse-Japan (SFBM_1249), Ralstonia solanacearum Po82 (CODA), Salinisphaera shabanensis E1L3A (SSPSH_07086), Paenibacillus mucilaginosus KNP414 (KNP414_03230, KNP414_03233), Bradyrhizobium japonicum USDA 6 (BJ6T_60100, BJ6T_60090), Candidatus Arthromitus sp. SFB-rat-Yit (RATSFB_1079), Pseudomonas putida S16 (PPS_2740), Weissella koreensis KACC 15510 (WKK_05060), Enterobacter cloacae EcWSU1 (YAHJ, CODA), Bizionia argentinensis JUB59 (BZARG_2213), Agrobacterium tumefaciens F2 (AGAU_L101956), Paracoccus denitrificans SD1 (PDI_1216), Sulfobacillus acidophilus TPY (CODA), Vibrio tubiashii ATCC 19109 (VITU9109_13741), Nitrosococcus watsonii C-113 (NWAT_2475), Blattabacterium sp. (Mastotermes darwiniensis) str. MADAR (CODA), Blattabacterium sp. (Cryptocercus punctulatus) str. Cpu (CODA), Pelagibacterium halotolerans B2 (KKY_852, KKY_850), Burkholderia sp. YI23 (BYI23_A018410, BYI23_A008960), Synechococcus sp. CC9605 (SYNCC9605_0854), Pseudomonas fluorescens F113 (AEV61892.1), Vibrio sp. EJY3 (VEJY3_16491), Synechococcus elongatus PCC 7942 (SYNPCC7942_0568), Bradyrhizobium sp. ORS 278 (BRAD01789, BRADO0862), Synechocystis sp. PCC 6803 (CODA), Microcoleus chthonoplastes PCC 7420 (MC7420_274), Prochlorococcus marinus str. AS9601 (CODA), Escherichia coli O157:H7 str. EDL933 (YAHJ, CODA), Pseudomonas putida KT2440 (CODA), Synechococcus sp. WH 8109 (SH8109_1371), Prochlorococcus marinus subsp. marinus str. CCMP1375 (SSNA), Prochlorococcus marinus str. MIT 9515 (CODA), Prochlorococcus marinus str. MIT 9301 (CODA), Prochlorococcus marinus str. NATL1A (CODA), Agrobacterium tumefaciens str. C58 (ATU4698), Desulfobacterium autotrophicum HRM2 (CODA), Cyanobium sp. PCC 7001 (CPCC7001_2605), Yersinia pestis KIM10 (CODA), Clostridium perfringens ATCC 13124 (CODA), Nocardioides sp. JS614 (NOCA_1495), Corynebacterium efficiens YS-314 (CODA), Corynebacterium glutamicum ATCC 13032 (CGL0076, CODA), Bacillus anthracis str. Ames (BAS4389), Dickeya dadantii 3937 (CODA), Escherichia coli CFT073 (CODA, YAHJ), Trichodesmium erythraeum IMS101 (TERY_4570), Pseudomonas fluorescens Pf0-1 (CODA, PFL01_3146), Bifidobacterium longum NCC2705 (CODA), Carnobacterium sp. 17-4 (CAR_C04640, ATZC), Pseudomonas aeruginosa PAO1 (CODA), Clostridium tetani E88 (CTC_01883), Yersinia pestis C092 (CODA), Burkholderia cenocepacia J2315 (BCAM2780, CODA), Pseudomonas fluorescens SBW25 (CODA), Vibrio vulnificus CMCP6 (VV2_0789), Salmonella bongori NCTC 12419 (CODA), Salmonella enterica subsp. enterica serovar Typhi str. CT18 (CODA), Pseudomonas fluorescens Pf-5 (CODA), Oceanobacillus iheyensis HTE831 (OB1267), Synechococcus sp. R59916 (RS9916_32902), Synechococcus sp. RS9917 (RS9917_02061), Mannheimia succiniciproducens MBEL55E (SSNA), Vibrio parahaemolyticus RIMD 2210633 (VPA1243), Bradyrhizobium japonicum USDA 110 (BLL3846, BLL7276), Marinobacter adhaerens HP15 (HP15_2772), Enterococcus faecalis V583 3 seqs

[0362] EF_1061, EF_1062, EF_0390), Bacillus cereus ATCC 14579 (BC_4503), Synechococcus sp. CB0101 (SCB01_010100001875), Synechococcus sp. CB0205 (SCB02_010100013621), Burkholderia mallei ATCC 23344 (CODA), Labrenzia alexandrii DFL-11 (SADFL11_5050), Myxococcus xanthus DK 1622 (MXAN_5420), Ruegeria pomeroyi DSS-3 (SPO2806), Gloeobacter violaceus PCC 7421 (GLL2528), Streptomyces sp. C (SSNG_03287, SSNG_04186), Ralstonia eutropha JMP134 (REUT_B3993), Moorella thermoacetica ATCC 39073 (MOTH_0460), Rubrobacter xylanophilus DSM 9941 (RXYL_0224), Burkholderia xenovorans LB400 (BXE_A2120, BXE_A1533), Sinorhizobium meliloti 1021 (R02596), Mesorhizobium loti MAFF303099 (MLR5363, MLL2061), Ralstonia solanacearum GMI1000 (CODA), Synechococcus elongatus PCC 6301 (CODA), Burkholderia vietnamiensis G4 (BCEP1808_4874), Rhodospirillum rubrum ATCC 11170 (RRU_A2788), Marinobacter sp. ELB17 (MELB17_06099), Gluconacetobacter diazotrophicus PA1 5 (GDIA_2518, GD13632), Klebsiella pneumoniae subsp. pneumoniae MGH 78578 (KPN_00632, CODA), Pasteurella multocida subsp. multocida str. Pm70 (PM0565), Rhodobacter sphaeroides 2.4.1 (RSP_0341), Pediococcus pentosaceus ATCC 25745 (PEPE_0241), Pseudogulbenkiania ferrooxidans 2002 (FURADRAFT_0739), Desulfuromonas acetoxidans DSM 684 (DACE_0684), Aurantimonas manganoxydans SI85-9A1 (SI859A1_01947), Bradyrhizobium sp. BTAi1 (BBTA_2105, BBTA_7204), Cronobacter sakazakii ATCC BAA-894 (ESA_03405), Arthrobacter aurescens TC1 (AAUR_3889, AAUR_0925), Arthrobacter sp. FB24 (ARTH_3600), Jannaschia sp. CCS1 (JANN_1306), Polaromonas sp. JS666 (BPRO_1960), Photobacterium profundum SS9 (Y3946), Frankia sp. EuI1c (FRAEUI1C_4724, FRAEUI1C_4625), Thermomicrobium roseum DSM 5159 (TRD_1845), Agrobacterium vitis S4 (AVI_2101, AVI_2102), Agrobacterium radiobacter K84 5 seqs ARAD_9085, ARAD_9086, ARAD_8033, ARAD_3518, ARAD_9893), Vibrio fischeri ES114 (CODA), Lyngbya sp. PCC 8106 (L8106_10086), Synechococcus sp. BL107 (BL107_11056), Bacillus sp. NRRL B-14911 (B14911_04044), Roseobacter sp. MED193 (MED193_17224), Roseovarius sp. 217 (R05217_10957), Pelagibaca bermudensis HTCC2601 (R2601_16485, R2601_00530), Marinomonas sp. MED121 (MED121_23629), Lactobacillus sakei subsp. sakei 23K (LCA_1212), Bacillus weihenstephanensis KBAB4 (BCERKBAB4_4331), Rhodopseudomonas palustris HaA2 (RPB_2084), Aliivibrio salmonicida LFI1238 (CODA), Synechococcus sp. CC9902 (SYNCC9902_1538), Escherichia coli str. K-12 substr. W3110 (CODA, YAHJ), Paracoccus denitrificans PD1222 (PDEN_1057), Synechococcus sp. WH 7803 (CODA), Synechococcus sp. JA-3-3Ab (CYA_1567, CODA), Synechococcus sp. JA-2-3Ba(2-13) (CYB_1063, CODA), Brevibacterium linens BL2 (BLINB_010200009485), Azotobacter vinelandii DJ (CODA), Paenibacillus sp. JDR-2 6 seqs PJDR2_6131, PJDR2_6134, PJDR2_3617, PJDR2_3622, PJDR2_3255, PJDR2_3254), Frankia alni ACN14a (FRAAL4250), Bifidobacterium breve UCC2003 (CODA), Blattabacterium sp. (Blattella germanica) str. Bge (BLBBGE_353), alpha proteobacterium BAL199 (BAL199_01644, BAL199_09865), Carnobacterium sp. AT7 (CAT7_10495, CAT7_05806), Nitrosomonas eutropha C91 (NEUT_1722), Vibrio harveyi ATCC BAA-1116 (VIBHAR_05319), Burkholderia ambifaria AMMD (BAMB_3745, BAMB_4900), Actinobacillus succinogenes 130Z (ASUC_1190), Rhodobacter sphaeroides ATCC 17025 (RSPH17025_0955), Lactobacillus reuteri 100-23 (LR0661), Acidiphilium cryptum JF-5 (ACRY_0828), Hahella chejuensis KCTC 2396 (HCH_05147), Alkaliphilus oremlandii OhILAs (CLOS_1212, CLOS_2457), Burkholderia dolosa AU0158 (BDAG_04094, BDAG_03273), Roseobacter sp. AzwK-3b (RAZWK3B_08901), Pseudomonas putida Fl (PPUT_2527), Clostridium phytofermentans ISDg (CPHY_3622), Brevibacillus brevis NBRC 100599 4 seqs BBR47_15870, BBR47_15630, BBR47_15620, BBR47_15610), Bordetella avium 197N (CODA), Escherichia coli 536 (CODA, YAHJ), Polaromonas naphthalenivorans CJ2 (PNAP_4007), Ramlibacter tataouinensis TTB310 (CODA), Janthinobacterium sp. Marseille (CODA), Pseudomonas stutzeri A1501 (CODA), Aeromonas hydrophila subsp. hydrophila ATCC 7966 (CODA), Ralstonia eutropha H16 (CODA, SSNA), Pseudomonas entomophila L48 (PSEEN3598), Labrenzia aggregata IAM 12614 (SIAM614_16372, SIAM614_21000), Lactobacillus brevis ATCC 367 (LVIS_1932), Sagittula stellata E-37 (SSE37_18952), Bacillus sp. B14905 3 seqsBB14905_20948, BB14905_12010, BB14905_12015), Pseudomonas putida W619 3 seqs PPUTW619_3228, PPUTW619_2210, PPUTW619_2162), Stenotrophomonas maltophilia R551-3 (SMAL_2348), Burkholderia phymatum STM815 (BPHY_1477), Vibrionales bacterium SWAT-3 (VSWAT3_26556), Roseobacter sp. GAI101 (RGAI101_2568), Vibrio shilonii AK1 (VSAK1_17107), Pedobacter sp. BAL39 (PBAL39_00410), Roseovarius sp. TM1035 (RTM1035_18230, RTM1035_17900), Octadecabacter antarcticus 238 (OA238_4970), Phaeobacter gallaeciensis DSM 17395 (CODA), Oceanibulbus indolifex HEL-45 (OIHEL45_14065, OIHEL45_01925), Octadecabacter antarcticus 307 (OA307_78), Verminephrobacter eiseniae EF01-2 (VEIS_0416, VEIS_4430), Shewanella woodyi ATCC 51908 (SWOO_1853), Yersinia enterocolitica subsp. enterocolitica 8081 (CODA), Clostridium cellulolyticum H10 (CCEL_0909), Burkholderia multivorans ATCC 17616 (CODA, BMUL_4281), Leptothrix cholodnii SP-6 (LCHO_0318), Acidovorax citrulli AAC00-1 (AAVE_3221), Burkholderia phytofirmans PsJN (BPHYT_2598, BPHYT_2388), Delftia acidovorans SPH-1 (DACI_4995), Shewanella pealeana ATCC 700345 (SPEA_2187), Dinoroseobacter shibae DFL 12 (CODA), Pseudomonas mendocina ymp (PMEN_3834), Serratia proteamaculans 568 (SPRO_0096, SPRO_4594), Enterobacter sp. 638 (ENT638_3792, ENT638_3140), Marinomonas sp. MWYL1 (MMWYL1_1583), Saccharopolyspora erythraea NRRL 2338 (SERYN2_010100001217), Xenorhabdus nematophila ATCC 19061 (XNC1_2097), Nocardioidaceae bacterium Broad-1 (NBCG_02556), Hoeflea phototrophica DFL-43 (HPDFL43_16047), Paracoccus sp. TRP (PATRP_010100008956), Cyanothece sp. PCC 8801 (PCC8801_1952), Shewanella sediminis HAW-EB3 (SSED_2803), Methylobacterium sp. 4-46 (M446_3603, M446_0933), Methylobacterium radiotolerans JCM 2831 (MRAD2831_4824), Azorhizobium caulinodans ORS 571 (AZC_1945), Ochrobactrum anthropi ATCC 49188 (OANT_3311), Ruegeria sp. R11 (RR11_1621), Cyanothece sp. ATCC 51142 (CODA), Streptomyces clavuligerus ATCC 27064 (SCLAA2_010100026671, SCLAV_5539), Lysinibacillus sphaericus C3-41 (BSPH_4231), Clostridium botulinum NCTC 2916 (CODA), Anaerotruncus colihominis DSM 17241 (ANACOL_03998, ANACOL_02279, ANACOL_01309), Actinosynnema mirum DSM 43827 (AMIR_0538), Sanguibacter keddieii DSM 10542 (SKED_28020, SKED_17260), Stackebrandtia nassauensis DSM 44728 (SNAS_1703), Microcystis aeruginosa NIES-843 (MAE_05360), Clostridium perfringens NCTC 8239 (CODA), Kitasatospora setae KM-6054 (KSE_36300, KSE_36320), Arthrobacter chlorophenolicus A6 (ACHL_1061), Streptomyces griseus subsp. griseus NBRC 13350 (SGR_6458), Clostridium sp. 7_2_43 FAA (CSBG_02087), Clostridiales bacterium 1_7_47 FAA (CBFG_00901), Streptomyces albus J1074 (SSHG_05633), Shewanella halifaxensis HAW-EB4 (SHAL_2160), Methylobacterium nodulans ORS 2060 (MNOD_3349), Streptomyces sp. Mg1 (SSAG_05271), Erwinia tasmaniensis Et1/99 (CODA), Escherichia coli BL21(DE3) (YAHJ, CODA, B21_00295, B21_00283), Conexibacter woesei DSM 14684 (CWOE_5700, CWOE_5704, CWOE_0344), Citrobacter sp. 30_2 (CSAG_03013, CSAG_02691), Burkholderiales bacterium 1_1_47 (HMPREF0189_01313), Enterobacteriaceae bacterium 9_2_54 FAA (HMPREF0864_03568), Fusobacterium ulcerans ATCC 49185 (FUAG_02220), Fusobacterium varium ATCC 27725 (FVAG_00901), Beutenbergia cavernae DSM 12333 (BCAV_1683, BCAV_1451), Providencia stuartii ATCC 25827 (PROSTU_04183), Proteus penneri ATCC 35198 (PROPEN_03672), Streptosporangium roseum DSM 43021 (SROS_3184, SROS_4847), Paenibacillus sp. Y412MC10 (GYMC10_2692, GYMC10_4727, GYMC10_3398), Escherichia coli ATCC 8739 (YAHJ, CODA), Ktedonobacter racemifer DSM 44963 (KRAC_3038), Marinomonas posidonica IVIA-Po-181 (MAR181_2188), Cyanothece sp. PCC 7822 (CYAN7822_1898), Edwardsiella tarda EIB202 (CODA), Providencia rustigianii DSM 4541 (PROVRUST_05865), Enterobacter cancerogenus ATCC 35316 (ENTCAN_08376, ENTCAN_08631), Citrobacter youngae ATCC 29220 (CIT292_10672, CIT292_09697), Citreicella sp. SE45 (CSE45_2970), Escherichia albertii TW07627 (ESCAB7627_0317), Oligotropha carboxidovorans 0M5 (OCAR_4627, CODA), Escherichia coli str. K-12 substr. MG1655 (YAHJ, CODA), Lactobacillus buchneri NRRL B-30929 (LBUC_2038), Arthrospira maxima CS-328 (AMAXDRAFT_2897), Pantoea sp. aB (PANABDRAFT_0565, PANABDRAFT_2938), Eubacterium biforme DSM 3989 (EUBIFOR_01772), Providencia alcalifaciens DSM 30120 (PROVALCAL_01131, PROVALCAL_02804), Providencia rettgeri DSM 1131 (PROVRETT_08714, PROVRETT_08169), Stenotrophomonas maltophilia K279a (ATZC2), Anaerococcus lactolyticus ATCC 51172 (CODA), Anaerococcus tetradius ATCC 35098 (HMPREF0077_0097), Chryseobacterium gleum ATCC 35910 (DAN2), Lactobacillus buchneri ATCC 11577 (CODA), Lactobacillus vaginalis ATCC 49540 (CODA), Listeria grayi DSM 20601 (HMPREF0556_10753, HMPREF0556_10751, ATZC), Desulfomicrobium baculatum DSM 4028 (DBAC_2936), Anaerococcus prevotii DSM 20548 (APRE_1112), Sebaldella termitidis ATCC 33386 (STERM_0789), Meiothermus silvanus DSM 9946 (MESIL_2103), Proteus mirabilis HI4320 (CODA), Mesorhizobium opportunistum WSM2075 (MESOP_0162), Variovorax paradoxus 5110 (VAPAR_2654), Bacillus megaterium QM B1551 (BMQ_0980), Bifidobacterium pseudocatenulatum DSM 20438=JCM 1200 (BIFPSEUDO_04382), Ferrimonas balearica DSM 9799 (FBAL_2173), Ruminococcaceae bacterium D16 (HMPREF0866_00501), Photorhabdus asymbiotica subsp. asymbiotica ATCC 43949 (PAU_00294), Halothiobacillus neapolitanus c2 (HNEAP_0844), Haemophilus parasuis SH0165 (CODA), Dickeya zeae Ech1591 (DD1591_0763), Bilophila wadsworthia 3_1_6 (HMPREF0179_03393), Enterococcus gallinarum EG2 (EGBG_00349), Enterococcus casseliflavus EC20 (ECBG_00307), Spirochaeta smaragdinae DSM 11293 (SPIRS_1052, SPIRS_0110), Acinetobacter junii SH205 (HMPREF0026_02783), Vibrio splendidus LGP32 (VS_II0327), Dickeya dadantii Ech703 (DD703_0777), Moritella sp. PE36 (PE36_15643), Hirschia baltica ATCC 49814 (HBAL_0036), Aminomonas paucivorans DSM 12260 (APAU_2064), Weissella paramesenteroides ATCC 33313 (CODA), Dickeya dadantii Ech586 (DD586_3388), Streptomyces sp. SPB78 (SSLG_06016), Streptomyces sp. AA4 (SSMG_05855, SSMG_03227), Streptomyces viridochromogenes DSM 40736 (SSQG_04727), Streptomyces flavogriseus ATCC 33331 (SFLA_1190), Anaerobaculum hydrogeniformans ATCC BAA-1850 (HMPREF1705_02256), Pantoea sp. At-9b (PAT9B_3678, PAT9B_1029, PAT9B_0855), Variovorax paradoxus EPS (VARPA_3257, VARPA_0920), Prochlorococcus marinus subsp. pastoris str. CCMP1986 (CODA), Synechococcus sp. WH 7805 (WH7805_05676), Blattabacterium sp. (Periplaneta americana) str. BPLAN (CODA), Burkholderia glumae BGR1 (BGLU_1 G17900), Azoarcus sp. BH72 (CODA), Clostridium butyricum E4 str. BoNT E BL5262 (CODA), Erwinia pyrifoliae Ep1/96 (CODA), Erwinia billingiae Eb661 (EBC_35430, CODA, EBC_32850, EBC_32780), Edwardsiella ictaluri 93-146 (NT01EI_3615), Citrobacter rodentium ICC168 (CODA), Starkeya novella DSM 506 (SNOV_3614, SNOV_2304), Burkholderia sp. CCGE1001 (BC1001_2311), Burkholderia sp. CCGE1002 (BC1002_1908, BC1002_1610), Burkholderia sp. CCGE1003 (BC1003_1147), Enterobacter asburiae LF7a (ENTAS_4074, ENTAS_3370), Ochrobactrum intermedium LMG 3301 (OINT_2000395, OINT_2001541), Clostridium lentocellum DSM 5427 (CLOLE_1291), Desulfovibrio aespoeensis Aspo-2 (DAES_2101), Gordonia neofelifaecis NRRL B-59395 (SCNU_19677), Synechococcus sp. CC9311 (SYNC_0740), Thermaerobacter marianensis DSM 12885 (TMAR_1477), Rhodomicrobium vannielii ATCC 17100 (RVAN_3395), Bacillus cellulosilyticus DSM 2522 (BCELL_1091, BCELL_1234), Cyanothece sp. PCC 7424 (PCC7424_0235), Lachnospiraceae bacterium 3_1_57 FAA_CT1 (HMPREF0994_04419), Bacillus sp. 2_A_57_CT2 (HMPREF1013_04901, HMPREF1013_04902, HMPREF1013_01532, HMPREF1013_04888), Afipia sp. 1NLS2 (AFIDRAFT_3092), Bacillus clausii KSM-K16 (ABC4032), Serratia odorifera DSM 4582 (YAHJ, CODA), Vibrio alginolyticus 40B (VMC_19080), Pseudonocardia dioxanivorans CB1190 (PSED_5383), Vibrio coralliilyticus ATCC BAA-450 (VIC_002709), Vibrio orientalis CIP 102891=ATCC 33934 (VIA_000851), Photobacterium damselae subsp. damselae CIP 102761 (VDA_000799), Prevotella buccalis ATCC 35310 (HMPREF0650_2329), Serratia odorifera 4Rx13 (SOD_G01050, SOD_H00810), Synechococcus sp. WH 5701 (WH5701_16173, WH5701_07386), Arthrospira platensis NIES-39 (BAI89358.1), Vibrio sp. N418 (VIBRN418_08807), Enterobacter cloacae SCF1 (ENTCL_0362), Pediococcus claussenii ATCC BAA-344 (CODA), Pantoea ananatis LMG 20103 (CODA, YAHJ), Bradyrhizobiaceae bacterium SG-6C (CSIRO_2009), Pantoea vagans C9-1 (CODA, YAHJ), Lactobacillus fermentum CECT 5716 (LC40_0597), Lactobacillus iners AB-1 (LINEA_010100006044), Lysinibacillus fusiformis ZC1 (BFZC1_05123, BFZC1_05118), Paenibacillus vortex V453 (PVOR_16204, PVOR_25863), Enterobacter cloacae subsp. cloacae ATCC 13047 (ECL_04741, ECL_03997), Marinomonas mediterranea MMB-1 (MARME_0493), Enterobacter cloacae subsp. cloacae NCTC 9394 (ENC_29090, ENC_34640), Rahnella sp. Y9602 (RAHAQ_4063, RAHAQ_0278), Achromobacter piechaudii ATCC 43553 (HMPREF0004_2397, ATZC, CODA), Sutterella wadsworthensis 3_1_45 B (HMPREF9464_00595), Pseudomonas fulva 12-X (PSEFU_1564), Rahnella aquatilis CIP 78.65=ATCC 33071 (AEX50243.1, AEX53933.1), Prochlorococcus marinus str. MIT 9312 (PMT9312_1400), Prochlorococcus marinus str. MIT 9313 (CODA), Pseudomonas fluorescens WH6 (YAHJ), Clostridium ljungdahlii DSM 13528 (CLJU_C19230), Streptomyces bingchenggensis BCW-1 (SBI_06150), Amycolatopsis mediterranei U32 (AMED_1997), Microcoleus vaginatus FGP-2 (MICVADRAFT_2986, MICVADRAFT_1253), Ketogulonigenium vulgarum WSH-001 (CODAB, KVU_1143), Achromobacter xylosoxidans A8 (AXYL_01223, AXYL_05738, AXYL_01981, CODA), Pedobacter saltans DSM 12145 (PEDSA_0106), Mesorhizobium ciceri biovar biserrulae WSM1271 (MESCI_0163), Pseudomonas putida GB-1 (PPUTGB1_2651, PPUTGB1_3590), Xanthobacter autotrophicus Py2 (XAUT_4058), Synechococcus sp. WH 8102 (CODA), Corynebacterium variabile DSM 44702 (CODA), Agrobacterium sp. H13-3 (AGROH133_09551), Pediococcus acidilactici DSM 20284 (CODA), Haemophilus parainfluenzae T3T1 (PARA_18250), Weeksella virosa DSM 16922 (WEEVI_1993), Aerococcus urinae ACS-120-V-Col10a (CODA), Thermaerobacter subterraneus DSM 13965 (THESUDRAFT_1163), Aeromonas caviae Ae398 (ACAVA_010100000636), Burkholderia rhizoxinica HKI 454 (RBRH_03808), Salmonella enterica subsp. arizonae serovar str. RSK2980 (SARI_04290), Hylemonella gracilis ATCC 19624 (HGR_11321), Aggregatibacter segnis ATCC 33393 (CODA), Roseovarius nubinhibens ISM (ISM_11230), Plautia stali symbiont (PSTAS_010100016161, PSTAS_010100013574), Peptoniphilus harei ACS-146-V-Sch2b (CODA), Pseudovibrio sp. FO-BEG1 (PSE_0768), Weissella cibaria KACC 11862 (WCIBK1_010100001529), Synechococcus sp. PCC 7335 (S7335_2052, S7335_109, S7335_1731), Anaerolinea thermophila UNI-1 (ANT_02950), Prochlorococcus marinus str. MIT 9211 (CODA), Prochlorococcus marinus str. MIT 9215 (CODA), Fructobacillus fructosus KCTC 3544 (FFRUK3_010100004834), Lactobacillus farciminis KCTC 3681 (LFARK3_010100001847), Lactobacillus fructivorans KCTC 3543 (LFRUK3_010100002075), Tetragenococcus halophilus NBRC 12172 (TEH_05430, TEH_14850, TEH_02220), Vibrio brasiliensis LMG 20546 (VIBRO546_14545), Cupriavidus taiwanensis LMG 19424 (CODA), Microbacterium testaceum StLB037 (MTES_1247, MTES_3600), Paenibacillus terrae HPL-003 (HPL003_22070), Rubrivivax benzoatilyticus JA2 (RBXJA2T_04743), Polymorphum gilvum SL003B-26A1 (SL003B_2461), Salmonella enterica subsp. enterica serovar Typhimurium str. LT2 (STM3334), Streptomyces griseoaurantiacus M045 (SGM_3210), Aeromonas veronii B565 (B565_3987), Halomonas sp. TD01 (GME_08209), Burkholderia gladioli BSR3 (BGLA_2 G13660).

[0363] In some embodiments, the genetically engineered bacteria are administered intratumorally and 5-FC is administered systemically. In some embodiments, both the genetically engineered bacteria and 5-FC are administered systemically.

[0364] In any of these embodiments, the bacteria genetically engineered to produce 0% to 2% to 4%, 4% to 6%,6% to 8%, 8% to 10%, 10% to 12%, 12% to 14%, 14% to 16%, 16% to 18%, 18% to 20%, 20% to 25%,25% to 30%, 30% to 35%, 35% to 40%,40% to 45% 45% to 50%, 50% to 55%, 55% to 60%, 60% to 65%, 65% to 70% to 80%, 80% to 90%, or 90% to 100% more 5-FU from 5-FC than unmodified bacteria of the same bacterial subtype under the same conditions, e.g., under in vitro or in vivo conditions. In yet another embodiment, the genetically engineered bacteria produce at least about 1.0-1.2-fold, 1.2-1.4-fold, 1.4-1.6-fold, 1.6-1.8-fold, 1.8-2-fold, or two-fold more 5-FU from 5-FC than unmodified bacteria of the same bacterial subtype under the same conditions. In yet another embodiment, the genetically engineered bacteria produce about three-fold, four-fold, five-fold, six-fold, seven-fold, eight-fold, nine-fold, ten-fold, fifteen-fold, twenty-fold, thirty-fold, forty-fold, or fifty-fold, hundred-fold, five hundred-fold, or one-thousand-fold more 5-FU from 5-FC than unmodified bacteria of the same bacterial subtype under the same conditions, e.g. under in vitro or in vivo conditions.

[0365] In any of these embodiments, the bacteria genetically engineered to produce 5-FU consume 0% to 2% to 4%, 4% to 6%,6% to 8%, 8% to 10%, 10% to 12%, 12% to 14%, 14% to 16%, 16% to 18%, 18% to 20%, 20% to 25%,25% to 30%, 30% to 35%, 35% to 40%,40% to 45% 45% to 50%, 50% to 55%, 55% to 60%, 60% to 65%, 65% to 70% to 80%, 80% to 90%, or 90% to 100% or more increased amounts of 5-FC than unmodified bacteria of the same bacterial subtype under the same conditions. In yet another embodiment, the genetically engineered bacteria consume 1.0-1.2-fold, 1.2-1.4-fold, 1.4-1.6-fold, 1.6-1.8-fold, 1.8-2-fold, or two-fold more 5-FC than unmodified bacteria of the same bacterial subtype under the same conditions. In yet another embodiment, the genetically engineered bacteria produce about three-fold, four-fold, five-fold, six-fold, seven-fold, eight-fold, nine-fold, ten-fold, fifteen-fold, twenty-fold, thirty-fold, forty-fold, fifty-fold, hundred-fold, five hundred-fold, or one-thousand-fold or more increased amounts of 5-FC than unmodified bacteria of the same bacterial subtype under the same conditions.

[0366] In any of these embodiments, the genetically engineered bacteria comprising gene sequences encoding a circuit for the conversion of 5-FC to 5-FU are capable of reducing cell proliferation by at least about 10% to 20%, 20% to 25%, 25% to 30%, 30% to 40%, 40% to 50%, 50% to 60%, 60% to 70%, 70% to 75%, 75% to 80%, 80% to 85%, 85% to 90%, 90% to 95%, 95% to 99%, or more as compared to an unmodified bacteria of the same subtype under the same conditions. In any of these embodiments, the genetically engineered bacteria comprising gene sequences encoding a circuit for the conversion of 5-FC to 5-FU are capable of reducing tumor growth by at least about 10% to 20%, 20% to 25%, 25% to 30%, 30% to 40%, 40% to 50%, 50% to 60%, 60% to 70%, 70% to 75%, 75% to 80%, 80% to 85%, 85% to 90%, 90% to 95%, 95% to 99%, or more as compared to an unmodified bacteria of the same subtype under the same conditions. In any of these embodiments, the genetically engineered bacteria comprising gene sequences encoding a circuit for the conversion of 5-FC to 5-FU are capable of reducing tumor size by at least about 10% to 20%, 20% to 25%, 25% to 30%, 30% to 40%, 40% to 50%, 50% to 60%, 60% to 70%, 70% to 75%, 75% to 80%, 80% to 85%, 85% to 90%, 90% to 95%, 95% to 99%, or more as compared to an unmodified bacteria of the same subtype under the same conditions. In any of these conversion embodiments, the genetically engineered bacteria comprising gene sequences encoding a circuit for the conversion of 5-FC to 5-FU are capable of reducing tumor volume by at least about 10% to 20%, 20% to 25%, 25% to 30%, 30% to 40%, 40% to 50%, 50% to 60%, 60% to 70%, 70% to 75%, 75% to 80%, 80% to 85%, 85% to 90%, 90% to 95%, 95% to 99%, or more as compared to an unmodified bacteria of the same subtype under the same conditions. In any of these embodiments, the genetically engineered bacteria comprising gene sequences encoding a circuit for the conversion of 5-FC to 5-FU are capable of reducing tumor weight by at least about 10% to 20%, 20% to 25%, 25% to 30%, 30% to 40%, 40% to 50%, 50% to 60%, 60% to 70%, 70% to 75%, 75% to 80%, 80% to 85%, 85% to 90%, 90% to 95%, 95% to 99%, or more as compared to an unmodified bacteria of the same subtype under the same conditions.

[0367] In some embodiments, the genetically engineered bacteria comprise a gene sequence encoding CodA. In one embodiment, the CodA gene has at least about 80% identity with a SEQ ID NO: 1213. In another embodiment, the CodA gene has at least about 85% identity with SEQ ID NO: 1213. In one embodiment, the CodA gene has at least about 90% identity with SEQ ID NO: 1213. In one embodiment, the CodA gene has at least about 95% identity with SEQ ID NO: 1213. In another embodiment, the CodA gene has at least about 96%, 97%, 98%, or 99% identity with SEQ ID NO: 1213. Accordingly, in one embodiment, the CodA gene has at least about 80%, 81%, 82%, 83%, 84%, 85%, 86%, 87%, 88%, 89%, 90%, 91%, 92%, 93%, 94%, 95%, 96%, 97%, 98%, or 99% identity with SEQ ID NO: 1213. In another embodiment, the CodA gene comprises the sequence of SEQ ID NO: 1213. In yet another embodiment, the CodA gene consists of the sequence of SEQ ID NO: 1213.

[0368] In some embodiments, the genetically engineered bacteria comprise a gene sequence encoding a CodA polypeptide having at least about 80% identity with SEQ ID NO: 1216 OR SEQ ID NO: 1217. In some embodiments, the genetically engineered bacteria comprise a gene sequence encoding a CodA polypeptide that has about having at least about 90% identity with SEQ ID NO: 1216 OR SEQ ID NO: 1217. In some embodiments, the genetically engineered bacteria comprise a gene sequence encoding a CodA polypeptide that has about having at least about 95% identity with SEQ ID NO: 1216 OR SEQ ID NO: 1217. In some embodiments, the genetically engineered bacteria comprise a gene sequence encoding a CodA polypeptide that has about 80%, 81%, 82%, 83%, 84%, 85%, 86%, 87%, 88%, 89%, 90%, 91%, 92%, 93%, 94%, 95%, 96%, 97%, 98%, or 99% identity to SEQ ID NO: 1216 OR SEQ ID NO: 1217, or a functional fragment thereof. In another embodiment, the genetically engineered bacteria comprise a gene sequence encoding a CodA polypeptide comprising SEQ ID NO: 1216 OR SEQ ID NO: 1217. In yet another embodiment, the polypeptide expressed by the genetically engineered bacteria consists of SEQ ID NO: 1216 OR SEQ ID NO: 1217.

[0369] In some embodiments, cytosine deaminases are modified and/or mutated, e.g., to enhance stability, or to increase 5-FU production. In some embodiments, the genetically engineered bacteria and/or other microorganisms are capable of producing the cytosine deaminases under inducing conditions, e.g., under a condition(s) associated with immune suppression and/or tumor microenvironment. In some embodiments, the genetically engineered bacteria and/or other microorganisms are capable of producing the cytosine deaminases in low-oxygen conditions or hypoxic conditions, in the presence of certain molecules or metabolites, in the presence of molecules or metabolites associated with cancer, or certain tissues, immune suppression, or inflammation, or in the presence of some other metabolite that may or may not be present in the gut, circulation, or the tumor, such as arabinose, cumate, and salicylate.

[0370] In some embodiments, the genetically engineered bacteria encode cytosine deaminases from E. coli. In some embodiments, cytosine deaminase from E. coli is modified and/or mutated, e.g., to enhance stability, or to increase 5-FU production. In some embodiments, the genetically engineered bacteria and/or other microorganisms are capable of producing the cytosine deaminases under inducing conditions, e.g., under a condition(s) associated with immune suppression and/or tumor microenvironment. In some embodiments, the genetically engineered bacteria and/or other microorganisms are capable of producing cytosine deaminase, in low-oxygen conditions or hypoxic conditions, in the presence of certain molecules or metabolites, in the presence of molecules or metabolites associated with cancer, or certain tissues, immune suppression, or inflammation, or in the presence of some other metabolite that may or may not be present in the gut, circulation, or the tumor, such as arabinose, cumate, and salicylate.

[0371] In some embodiments, the genetically engineered bacteria and/or other microorganisms are capable of expressing any one or more of the described circuits, including but not limited to, circuitry for the expression of cytosine deaminases, from E. coli, in low-oxygen conditions, and/or in the presence of cancer and/or the tumor microenvironment and/or the tumor microenvironment or tissue specific molecules or metabolites, and/or in the presence of molecules or metabolites associated with inflammation or immune suppression, and/or in the presence of metabolites that may be present in the gut or the tumor, and/or in the presence of metabolites that may or may not be present in vivo, and may be present in vitro during strain culture, expansion, production and/or manufacture, such as arabinose, cumate, and salicylate and others described herein. In some embodiments, the gene sequences(s) are controlled by a promoter inducible by such conditions and/or inducers. In some embodiments, the gene sequences(s) are controlled by a constitutive promoter, as described herein. In some embodiments, the gene sequences(s) are controlled by a constitutive promoter, and are expressed in in vivo conditions and/or in vitro conditions, e.g., during bacteria and/or other microorganisms expansion, production and/or manufacture, as described herein. In any of these embodiments, any one or more of the described circuits, including but not limited to, circuitry for the expression of cytosine deaminases, e.g., from E. coli, are present on one or more plasmids (e.g., high copy or low copy) or are integrated into one or more sites in the bacteria and/or other microorganism chromosome(s).

[0372] In any of these embodiments, the genetically engineered bacteria comprising gene sequence(s) encoding cytosine deaminases further comprise gene sequence(s) encoding one or more further effector molecule(s), i.e., therapeutic molecule(s) or a metabolic converter(s). In any of these embodiments, the circuit encoding cytosine deaminases may be combined with a circuit encoding one or more immune initiators or immune sustainers as described herein, in the same or a different bacterial strain (combination circuit or mixture of strains). The circuit encoding the immune initiators or immune sustainers may be under the control of a constitutive or inducible promoter, e.g., low oxygen inducible promoter or any other constitutive or inducible promoter described herein. In any of these embodiments, the gene sequence(s) encoding cytosine deaminases may be combined with gene sequence(s) encoding one or more STING agonist producing enzymes, as described herein, in the same or a different bacterial strain (combination circuit or mixture of strains). In some embodiments, the gene sequences which are combined with the gene sequence(s) encoding cytosine deaminases encode DacA. DacA may be under the control of a constitutive or inducible promoter, e.g., low oxygen inducible promoter such as FNR or any other constitutive or inducible promoter described herein. In some embodiments, the dacA gene is integrated into the chromosome. In some embodiments, the gene sequences which are combined with the gene sequence(s) encoding cytosine deaminases encode cGAS. cGAS may be under the control of a constitutive or inducible promoter, e.g., low oxygen inducible promoter such as FNR or any other constitutive or inducible promoter described herein. In some embodiments, the gene encoding cGAS is integrated into the chromosome. In any of these combination embodiments, the bacteria may further comprise an auxotrophic modification, e.g., a mutation or deletion in DapA, ThyA, or both. In any of these embodiments, the bacteria may further comprise a phage modification, e.g., a mutation or deletion, in an endogenous prophage as described herein.

[0373] In some embodiments, the genetically engineered bacteria and/or other microorganisms are further capable of expressing any one or more of the described circuits and further comprise one or more of the following: (1) one or more auxotrophies, such as any auxotrophies known in the art and provided herein, e.g., thyA auxotrophy, (2) one or more kill switch circuits, such as any of the kill-switches described herein or otherwise known in the art, (3) one or more antibiotic resistance circuits, (4) one or more transporters for importing biological molecules or substrates, such any of the transporters described herein or otherwise known in the art, (5) one or more secretion circuits, such as any of the secretion circuits described herein and otherwise known in the art, (6) one or more surface display circuits, such as any of the surface display circuits described herein and otherwise known in the art (7) one or more circuits for the production or degradation of one or more metabolites (e.g., kynurenine, tryptophan, adenosine, arginine) described herein and (8) combinations of one or more of such additional circuits. In any of these embodiments, the genetically engineered bacteria may be administered alone or in combination with one or more immune checkpoint inhibitors described herein, including but not limited to anti-CTLA4 antibodies or anti-PD1 or anti-PDL1 antibodies.

### Inhibition of Phagocytosis Escape—CD47-SIRPα Pathway

[0374] Cancers have the ability to up-regulate the “don't eat me” signal to allow escape from endogenous “eat me” signals that were induced as part of programmed cell death and programmed cell removal, to promote tumor progression.

[0375] CD47 is a cell surface molecule implicated in cell migration and T cell and dendritic cell activation. In addition, CD47 functions as an inhibitor of phagocytosis through ligation of signal-regulatory protein alpha (SIRPα) expressed on phagocytes, leading to tyrosine phosphatase activation and inhibition of myosin accumulation at the submembrane assembly site of the phagocytic synapse. As a result, CD47 conveys a “don't eat me signal”. Loss of CD47 leads to homeostatic phagocytosis of aged or damaged cells.

[0376] Elevated levels of CD47 expression are observed on multiple human tumor types, allowing tumors to escape the innate immune system through evasion of phagocytosis. This process occurs through binding of CD47 on tumor cells to SIRPα on phagocytes, thus promoting inhibition of phagocytosis and tumor survival.

[0377] Anti-CD47 antibodies have demonstrated pre-clinical activity against many different human cancers both in vitro and in mouse xenotransplantation models (Chao et al., Curr Opin Immunol. 2012 April; 24(2): 225-232. The CD47-SIRPα Pathway in Cancer Immune Evasion and Potential Therapeutic Implications, and references therein). In addition to CD47, SIRPα can also be targeted as a therapeutic strategy; for example, anti-SIRPα antibodies administered in vitro caused phagocytosis of tumor cells by macrophages (Chao et al., 2012).

[0378] In a third approach, CD47-targeted therapies have been developed using the single 14 kDa CD47 binding domain of human SIRPα (a soluble form without the transmembrane portion) as a competitive antagonist to human CD47 (as described in Weiskopf et al., Engineered SIRPα variants as immunotherapeutic adjuvants to anti-cancer antibodies; Science. 2013 Jul. 5; 341(6141): 10.1126/science.1238856, the contents of which is herein incorporated by reference in its entirety). Because the wild type SIRPα showed relatively low affinity to CD47, mutated SIRPα were generated through in vitro evolution via yeast surface display, which were shown to act as strong binders and antagonists of CD47. These variant include CV1 (consensus variant 1) and high-affinity variant FD6, and Fc fusion proteins of these variants. The amino acid changes leading to the increased affinity are located in the dl domain of human SIRPα. Non-limiting examples of SIRPα variants are also described in WO/2013/109752, the contents of which is herein incorporated by reference in its entirety.

[0379] In certain embodiments, the genetically engineered bacteria produce one or more immune modulators that inhibit CD47 and/or inhibit SIRPα and/or inhibit or prevent the interaction between CD47 and SIRPα expressed on macrophages. For example, the genetically engineered microorganism may encode an antibody directed against CD47 and/or an antibody directed against SIRPα, e.g. a single-chain antibody against CD47 and/or a single-chain antibody against SIRPα. In another non-limiting example, the genetically engineered microorganism may encode a competitive antagonist polypeptide comprising the SIRPα CD47 binding domain. Such a competitive antagonist polypeptide can function through competitive binding of CD47, preventing the interaction of CD47 with SIRPα expressed on macrophages. In some embodiments, the competitive antagonist polypeptide is soluble, e.g., is secreted from the microorganism. In some embodiments, the competitive antagonist polypeptide is displayed on the surface of the microorganism. In some embodiments, the genetically engineered microorganism encoding the competitive antagonist polypeptide encodes a wild type form of the SIRPα CD47 binding domain. In some embodiments, the genetically engineered microorganism encoding the competitive antagonist polypeptide encodes a mutated or variant form of the SIRPα CD47 binding domain. In some embodiments, the variant form is the CV1 SIRPα variant. In some embodiments, the variant form is the FD6 variant. In some embodiments, the SIRPα variant is a variant described in Weiskopf et al., and/or International Patent Publication WO/2013/109752. In some embodiments, the genetically engineered microorganism encoding the competitive antagonist polypeptide encodes a SIRPα CD47 binding domain or variant thereof fused to a stabilizing polypeptide. In some embodiments, the genetically engineered microorganism encoding the competitive antagonist polypeptide encodes a wild type form of the SIRPα CD47 binding domain fused to a stabilizing polypeptide. In a non-limiting example, the stabilizing polypeptide fused to the wild type SIRPα CD47 binding domain polypeptide is a Fc portion. In some embodiments, the stabilizing polypeptide fused to the wild type SIRPα CD47 binding domain polypeptide is the IgG Fc portion. In some embodiments, the stabilizing polypeptide fused to the wild type SIRPα CD47 binding domain polypeptide is the IgG4 Fc portion. In some embodiments, the genetically engineered microorganism encoding the competitive antagonist polypeptide encodes a mutated or variant form of the SIRPα CD47 binding domain fused to a stabilizing polypeptide. In some embodiments, the variant form fused to the stabilizing polypeptide is the CV1 SIRPα variant. In some embodiments, the variant form fused to the stabilizing polypeptide is the F6 variant. In some embodiments, the SIRPα variant fused to the stabilizing polypeptide is a variant described in Weiskopf et al., and/or International Patent Publication WO/2013/109752. In a non-limiting example, the stabilizing polypeptide fused to the variant SIRPα CD47 binding domain polypeptide is a Fe portion. In some embodiments, the stabilizing polypeptide fused to the variant SIRPα CD47 binding domain polypeptide is the IgG Fc portion. In some embodiments, the stabilizing polypeptide fused to the variant SIRPα CD47 binding domain polypeptide is an IgG4 Fc portion.

[0380] In some embodiments, the genetically engineered bacterium is bacterium that expresses an anti-CD47 antibody and/or anti-SIRPα antibody, e.g., a single chain antibody. In some embodiments, the genetically engineered bacterium is bacterium that expresses competitive antagonist SIRPα CD47 binding domain (WT or mutated to improve CD47 affinity). In some embodiments, the genetically engineered bacterium is bacterium that expresses an anti-CD47 antibody and/or anti-SIRPα antibody, e.g., a single chain antibody, under the control of a promoter that is activated by low-oxygen conditions. In some embodiments, the genetically engineered bacterium expresses a competitive antagonist SIRPα CD47 binding domain (WT or mutated variant with improved CD47 affinity) under the control of a promoter that is activated by low-oxygen conditions. In some embodiments, the genetically engineered bacterium expresses an anti-CD47 antibody and/or an anti-SIRPα, e.g., single chain antibody, under the control of a promoter that is activated by hypoxic conditions, or by inflammatory conditions, such as any of the promoters activated by said conditions and described herein. In some embodiments, the genetically engineered bacterium expresses a competitive antagonist SIRPα CD47 binding domain (WT or mutated variant with improved CD47 affinity) under the control of a promoter that is activated by hypoxic conditions, or by inflammatory conditions, such as any of the promoters activated by said conditions and described herein. In some embodiments, the genetically engineered bacteria expresses an anti-CD47antibody and/or an anti-SIRPα antibody, e.g., single chain antibody, under the control of a cancer-specific promoter, a tissue-specific promoter, or a constitutive promoter, such as any of the promoters described herein. In some embodiments, the genetically engineered bacteria comprise one or more genes encoding a competitive antagonist SIRPα CD47 binding domain (WT or mutated variant with improved CD47 affinity) under the control of a cancer-specific promoter, a tissue-specific promoter, or a constitutive promoter, such as any of the promoters described herein. In any of these embodiments, the genetically engineered microorganisms may also produce one or more immune modulators that are capable of stimulating Fc-mediated functions such as ADCC, and/or M-CSF and/or GM-CSF, resulting in a blockade of phagocytosis inhibition.

[0381] The genetically engineered bacteria and/or other microorganisms may comprise one or more genes encoding any suitable anti-CD47 antibody, anti-SIRPα antibody or competitive SIRPα CD47 binding domain polypeptide (wild type or mutated variant with improved CD47 binding affinity) for the inhibition or prevention of the CD47-SIRPα interaction. In some embodiments, the antibody(ies) or competitive polypeptide(s) is modified and/or mutated, e.g., to enhance stability, increase CD47 antagonism. In some embodiments, the genetically engineered bacteria and/or other microorganisms are capable of producing the antibody(ies) or competitive polypeptide(s) under inducing conditions, e.g., under a condition(s) associated with immune suppression and/or tumor microenvironment. In some embodiments, the genetically engineered bacteria and/or other microorganisms are capable of producing the antibody(ies) or competitive polypeptide(s) in low-oxygen conditions or hypoxic conditions, in the presence of certain molecules or metabolites, in the presence of molecules or metabolites associated with cancer, or certain tissues, immune suppression, or inflammation, or in the presence of some other metabolite that may or may not be present in the gut, circulation, or the tumor, such as arabinose, cumate, and salicylate.

[0382] In some embodiments, the genetically engineered bacteria comprise an anti-CD47 gene sequence encoding B6H12-anti-CD47-scFv. In some embodiments, the genetically engineered bacteria encode a polypeptide which is at least about 80%, at least about 85%, at least about 90%, at least about 95%, or at least about 99% homologous to SEQ ID NO: 994. In some embodiments, the genetically engineered bacteria encode a polypeptide comprising SEQ ID NO: 994. In some embodiments, the genetically engineered bacteria encode a polypeptide consisting of SEQ ID NO: 994. In some embodiments, the genetically engineered bacteria comprise an anti-CD47 gene sequence encoding 5F9-anti-CD47-scFv. In some embodiments, the genetically engineered bacteria encode a polypeptide which is at least about 80%, at least about 85%, at least about 90%, at least about 95%, or at least about 99% homologous to a sequence selected from SEQ ID NO: 996. In some embodiments, the genetically engineered bacteria encode a polypeptide comprising SEQ ID NO: 996. In some embodiments, the genetically engineered bacteria encode a polypeptide consisting of SEQ ID NO: 996. In some embodiments, the genetically engineered bacteria comprise an anti-CD47 gene sequence encoding 5F9antihCD47scFv-V5-HIS. In some embodiments, the Anti-CD47 scFv sequences is at least about 80%, at least about 85%, at least about 90%, at least about 95%, or at least about 99% homologous to a sequence selected from SEQ ID NO: 993 and SEQ ID NO: 995, excluding the non-coding regions and sequences coding for tags. In some embodiments, the gene sequence comprises a sequence selected from SEQ ID NO: 993 and SEQ ID NO: 995, excluding the non-coding regions and sequences coding for tags. In some embodiments, the gene sequence consists of a sequence selected from SEQ ID NO: 993 and SEQ ID NO: 995, excluding the non-coding regions and sequences coding for tags.

[0383] In some embodiments, the genetically engineered bacteria comprise a gene sequence encoding a SIRPα polypeptide having at least about 80% identity with a sequence selected from SEQ ID NO: 1118, SEQ ID NO: 1231, SEQ ID NO: 1119, SEQ ID NO: 1120. In some embodiments, the genetically engineered bacteria comprise a gene sequence encoding a SIRPα polypeptide having at least about 90% identity with a sequence selected from SEQ ID NO: 1118, SEQ ID NO: 1231, SEQ ID NO: 1119, SEQ ID NO: 1120. In some embodiments, the genetically engineered bacteria comprise a gene sequence encoding a SIRPα polypeptide having at least about 95% identity with a sequence selected from SEQ ID NO: 1118, SEQ ID NO: 1231, SEQ ID NO: 1119, SEQ ID NO: 1120. In some embodiments, the genetically engineered bacteria comprise a gene sequence encoding a SIRPα polypeptide that has about 80%, 81%, 82%, 83%, 84%, 85%, 86%, 87%, 88%, 89%, 90%, 91%, 92%, 93%, 94%, 95%, 96%, 97%, 98%, or 99% identity a to a sequence selected from SEQ ID NO: 1118, SEQ ID NO: 1231, SEQ ID NO: 1119, SEQ ID NO: 1120, or a functional fragment thereof. In another embodiment, the SIRPα polypeptide comprises a sequence selected from SEQ ID NO: 1118, SEQ ID NO: 1231, SEQ ID NO: 1119, and SEQ ID NO: 1120. In yet another embodiment, the polypeptide expressed by the genetically engineered bacteria consists of a sequence selected from SEQ ID NO: 1118, SEQ ID NO: 1231, SEQ ID NO: 1119, and SEQ ID NO: 1120.

[0384] In any of these embodiments, the genetically engineered bacteria produce at least about 0% to 2% to 4%, 4% to 6%,6% to 8%, 8% to 10%, 10% to 12%, 12% to 14%, 14% to 16%, 16% to 18%, 18% to 20%, 20% to 25%,25% to 30%, 30% to 35%, 35% to 40%,40% to 45% 45% to 50%, 50% to 55%, 55% to 60%, 60% to 65%, 65% to 70% to 80%, 80% to 90%, or 90% to 100% more SIRPα, SIRPα variant (e.g., CV1 or FD6 variant), or SIRPα-fusion protein (e.g., SIRPα IgG Fc fusion protein) than unmodified bacteria of the same bacterial subtype under the same conditions. In yet another embodiment, the genetically engineered bacteria produce at least about 1.0-1.2-fold, 1.2-1.4-fold, 1.4-1.6-fold, 1.6-1.8-fold, 1.8-2-fold, or two-fold more SIRPα, SIRPα variant (e.g., CV1 or FD6 variant), or SIRPα-fusion protein (e.g., SIRPα IgG Fc fusion protein) than unmodified bacteria of the same bacterial subtype under the same conditions. In yet another embodiment, the genetically engineered bacteria produce three-fold, four-fold, five-fold, six-fold, seven-fold, eight-fold, nine-fold, ten-fold, fifteen-fold, twenty-fold, thirty-fold, forty-fold, or fifty-fold, hundred-fold, five hundred-fold, or one-thousand-fold more SIRPα, SIRPα variant (e.g., CV1 or FD6 variant), or SIRPα-fusion protein (e.g., SIRPα IgG Fc fusion protein) than unmodified bacteria of the same bacterial subtype under the same conditions.

[0385] In any of these embodiments, the bacteria genetically engineered to produce SIRPα, SIRPα variant (e.g., CV1 or FD6 variant), or SIRPα-fusion protein (e.g., SIRPα IgG Fc fusion protein) secrete at least about 0% to 2% to 4%, 4% to 6%,6% to 8%, 8% to 10%, 10% to 12%, 12% to 14%, 14% to 16%, 16% to 18%, 18% to 20%, 20% to 25%,25% to 30%, 30% to 35%, 35% to 40%,40% to 45% 45% to 50%, 50% to 55%, 55% to 60%, 60% to 65%, 65% to 70% to 80%, 80% to 90%, or 90% to 100% more SIRPα, SIRPα variant (e.g., CV1 or FD6 variant), or SIRPα-fusion protein (e.g., SIRPα IgG Fc fusion protein) than unmodified bacteria of the same bacterial subtype under the same conditions. In yet another embodiment, the genetically engineered bacteria secrete at least about 1.0-1.2-fold, 1.2-1.4-fold, 1.4-1.6-fold, 1.6-1.8-fold, 1.8-2-fold, or two-fold more SIRPα, SIRPα variant (e.g., CV1 or FD6 variant), or SIRPα-fusion protein (e.g., SIRPα IgG Fc fusion protein) than unmodified bacteria of the same bacterial subtype under the same conditions. In yet another embodiment, the genetically engineered bacteria secrete three-fold, four-fold, five-fold, six-fold, seven-fold, eight-fold, nine-fold, ten-fold, fifteen-fold, twenty-fold, thirty-fold, forty-fold, fifty-fold, hundred-fold, five hundred-fold, or one-thousand-fold more SIRPα, SIRPα variant (e.g., CV1 or FD6 variant), or SIRPα-fusion protein (e.g., SIRPα IgG Fc fusion protein) than unmodified bacteria of the same bacterial subtype under the same conditions.

[0386] In some embodiments, the bacteria genetically engineered to secrete SIRPα, SIRPα variant (e.g., CV1 or FD6 variant), or SIRPα-fusion protein (e.g., SIRPα IgG Fc fusion protein) are capable of reducing cell proliferation by at least about 10% to 20%, 20% to 25%, 25% to 30%, 30% to 40%, 40% to 50%, 50% to 60%, 60% to 70%, 70% to 75%, 75% to 80%, 80% to 85%, 85% to 90%, 90% to 95%, 95% to 99%, or more as compared to an unmodified bacteria of the same subtype under the same conditions.

[0387] In some embodiments, the bacteria genetically engineered to secrete SIRPα, SIRPα variant (e.g., CV1 or FD6 variant), or SIRPα-fusion protein (e.g., SIRPα IgG Fc fusion protein) are capable of reducing tumor growth by at least about 10% to 20%, 20% to 25%, 25% to 30%, 30% to 40%, 40% to 50%, 50% to 60%, 60% to 70%, 70% to 75%, 75% to 80%, 80% to 85%, 85% to 90%, 90% to 95%, 95% to 99%, or more as compared to an unmodified bacteria of the same subtype under the same conditions.

[0388] In some embodiments, the bacteria genetically engineered to secrete SIRPα, SIRPα variant (e.g., CV1 or FD6 variant), or SIRPα-fusion protein (e.g., SIRPα IgG Fc fusion protein) are capable of reducing tumor size by at least about 10% to 20%, 20% to 25%, 25% to 30%, 30% to 40%, 40% to 50%, 50% to 60%, 60% to 70%, 70% to 75%, 75% to 80%, 80% to 85%, 85% to 90%, 90% to 95%, 95% to 99%, or more as compared to an unmodified bacteria of the same subtype under the same conditions.

[0389] In some embodiments, the bacteria genetically engineered to secrete SIRPα, SIRPα variant (e.g., CV1 or FD6 variant), or SIRPα-fusion protein (e.g., SIRPα IgG Fc fusion protein) are capable of reducing tumor volume by at least about 10% to 20%, 20% to 25%, 25% to 30%, 30% to 40%, 40% to 50%, 50% to 60%, 60% to 70%, 70% to 75%, 75% to 80%, 80% to 85%, 85% to 90%, 90% to 95%, 95% to 99%, or more as compared to an unmodified bacteria of the same subtype under the same conditions.

[0390] In some embodiments, the bacteria genetically engineered to secrete SIRPα, SIRPα variant (e.g., CV1 or FD6 variant), or SIRPα-fusion protein (e.g., SIRPα IgG Fc fusion protein) are capable of reducing tumor weight by at least about 10% to 20%, 20% to 25%, 25% to 30%, 30% to 40%, 40% to 50%, 50% to 60%, 60% to 70%, 70% to 75%, 75% to 80%, 80% to 85%, 85% to 90%, 90% to 95%, 95% to 99%, or more as compared to an unmodified bacteria of the same subtype under the same conditions. In some embodiments, the bacteria genetically engineered to produce secrete SIRPα, SIRPα variant (e.g., CV1 or FD6 variant), or SIRPα-fusion protein (e.g., SIRPα IgG Fc fusion protein) are capable of increasing the response rate by at least about 10% to 20%, 20% to 25%, 25% to 30%, 30% to 40%, 40% to 50%, 50% to 60%, 60% to 70%, 70% to 75%, 75% to 80%, 80% to 85%, 85% to 90%, 90% to 95%, 95% to 99%, or more as compared to an unmodified bacteria of the same subtype under the same conditions.

[0391] In some embodiments, the bacteria genetically engineered to secrete SIRPα, SIRPα variant (e.g., CV1 or FD6 variant), or SIRPα-fusion protein (e.g., SIRPα IgG Fc fusion protein) are capable of increasing phagocytosis of tumor cells by at least about 10% to 20%, 20% to 25%, 25% to 30%, 30% to 40%, 40% to 50%, 50% to 60%, 60% to 70%, 70% to 75%, 75% to 80%, 80% to 85%, 85% to 90%, 90% to 95%, 95% to 99%, or more as compared to an unmodified bacteria of the same subtype under the same conditions.

[0392] In any of these embodiments, the genetically engineered bacteria produce at least about 0% to 2% to 4%, 4% to 6%,6% to 8%, 8% to 10%, 10% to 12%, 12% to 14%, 14% to 16%, 16% to 18%, 18% to 20%, 20% to 25%,25% to 30%, 30% to 35%, 35% to 40%,40% to 45% 45% to 50%, 50% to 55%, 55% to 60%, 60% to 65%, 65% to 70% to 80%, 80% to 90%, or 90% to 100% more anti-CD47 scFv than unmodified bacteria of the same bacterial subtype under the same conditions. In yet another embodiment, the genetically engineered bacteria produce at least about 1.0-1.2-fold, 1.2-1.4-fold, 1.4-1.6-fold, 1.6-1.8-fold, 1.8-2-fold, or two-fold more anti-CD47 scFv than unmodified bacteria of the same bacterial subtype under the same conditions. In yet another embodiment, the genetically engineered bacteria produce three-fold, four-fold, five-fold, six-fold, seven-fold, eight-fold, nine-fold, ten-fold, fifteen-fold, twenty-fold, thirty-fold, forty-fold, or fifty-fold, hundred-fold, five hundred-fold, or one-thousand-fold more anti-CD47 scFv than unmodified bacteria of the same bacterial subtype under the same conditions.

[0393] In any of these embodiments, the bacteria genetically engineered to produce anti-CD47 scFv secrete at least about 0% to 2% to 4%, 4% to 6%,6% to 8%, 8% to 10%, 10% to 12%, 12% to 14%, 14% to 16%, 16% to 18%, 18% to 20%, 20% to 25%,25% to 30%, 30% to 35%, 35% to 40%,40% to 45% 45% to 50%, 50% to 55%, 55% to 60%, 60% to 65%, 65% to 70% to 80%, 80% to 90%, or 90% to 100% more anti-CD47 scFv than unmodified bacteria of the same bacterial subtype under the same conditions. In yet another embodiment, the genetically engineered bacteria secrete at least about 1.0-1.2-fold, 1.2-1.4-fold, 1.4-1.6-fold, 1.6-1.8-fold, 1.8-2-fold, or two-fold more anti-CD47 scFv than unmodified bacteria of the same bacterial subtype under the same conditions. In yet another embodiment, the genetically engineered bacteria secrete three-fold, four-fold, five-fold, six-fold, seven-fold, eight-fold, nine-fold, ten-fold, fifteen-fold, twenty-fold, thirty-fold, forty-fold, fifty-fold, hundred-fold, five hundred-fold, or one-thousand-fold more anti-CD47 scFv than unmodified bacteria of the same bacterial subtype under the same conditions.

[0394] In some embodiments, the bacteria genetically engineered to secrete anti-CD47 scFv are capable of reducing cell proliferation by at least about 10% to 20%, 20% to 25%, 25% to 30%, 30% to 40%, 40% to 50%, 50% to 60%, 60% to 70%, 70% to 75%, 75% to 80%, 80% to 85%, 85% to 90%, 90% to 95%, 95% to 99%, or more as compared to an unmodified bacteria of the same subtype under the same conditions.

[0395] In some embodiments, the bacteria genetically engineered to secrete anti-CD47 scFv are capable of reducing tumor growth by at least about 10% to 20%, 20% to 25%, 25% to 30%, 30% to 40%, 40% to 50%, 50% to 60%, 60% to 70%, 70% to 75%, 75% to 80%, 80% to 85%, 85% to 90%, 90% to 95%, 95% to 99%, or more as compared to an unmodified bacteria of the same subtype under the same conditions.

[0396] In some embodiments, the bacteria genetically engineered to secrete anti-CD47 scFv are capable of reducing tumor size by at least about 10% to 20%, 20% to 25%, 25% to 30%, 30% to 40%, 40% to 50%, 50% to 60%, 60% to 70%, 70% to 75%, 75% to 80%, 80% to 85%, 85% to 90%, 90% to 95%, 95% to 99%, or more as compared to an unmodified bacteria of the same subtype under the same conditions.

[0397] In some embodiments, the bacteria genetically engineered to secrete anti-CD47 scFv are capable of reducing tumor volume by at least about 10% to 20%, 20% to 25%, 25% to 30%, 30% to 40%, 40% to 50%, 50% to 60%, 60% to 70%, 70% to 75%, 75% to 80%, 80% to 85%, 85% to 90%, 90% to 95%, 95% to 99%, or more as compared to an unmodified bacteria of the same subtype under the same conditions.

[0398] In some embodiments, the bacteria genetically engineered to secrete anti-CD47 scFv are capable of reducing tumor weight by at least about 10% to 20%, 20% to 25%, 25% to 30%, 30% to 40%, 40% to 50%, 50% to 60%, 60% to 70%, 70% to 75%, 75% to 80%, 80% to 85%, 85% to 90%, 90% to 95%, 95% to 99%, or more as compared to an unmodified bacteria of the same subtype under the same conditions. In some embodiments, the bacteria genetically engineered to produce anti-CD47 scFv are capable of increasing the response rate by at least about 10% to 20%, 20% to 25%, 25% to 30%, 30% to 40%, 40% to 50%, 50% to 60%, 60% to 70%, 70% to 75%, 75% to 80%, 80% to 85%, 85% to 90%, 90% to 95%, 95% to 99%, or more as compared to an unmodified bacteria of the same subtype under the same conditions.

[0399] In some embodiments, the bacteria genetically engineered to secrete anti-CD47 scFv are capable of increasing phagocytosis of tumor cells by at least about 10% to 20%, 20% to 25%, 25% to 30%, 30% to 40%, 40% to 50%, 50% to 60%, 60% to 70%, 70% to 75%, 75% to 80%, 80% to 85%, 85% to 90%, 90% to 95%, 95% to 99%, or more as compared to an unmodified bacteria of the same subtype under the same conditions. In yet another embodiment, the genetically engineered bacteria increase phagocytosis of tumor cells by at least 1.0-1.2-fold, 1.2-1.4-fold, 1.4-1.6-fold, 1.6-1.8-fold, 1.8-2-fold, or two-fold more than unmodified bacteria of the same bacterial subtype under the same conditions. In yet another embodiment, the genetically engineered bacteria increase phagocytosis of tumor cells three-fold, four-fold, five-fold, six-fold, seven-fold, eight-fold, nine-fold, ten-fold, fifteen-fold, twenty-fold, thirty-fold, forty-fold, fifty-fold, hundred-fold, five hundred-fold, or one-thousand-fold more than unmodified bacteria of the same bacterial subtype under the same conditions.

[0400] In some embodiments, the genetically engineered bacteria and/or other microorganisms are capable of expressing any one or more of the described SIRPα or anti-CD47 circuits in low-oxygen conditions, and/or in the presence of cancer and/or the tumor microenvironment and/or the tumor microenvironment or tissue specific molecules or metabolites, and/or in the presence of molecules or metabolites associated with inflammation or immune suppression, and/or in the presence of metabolites that may be present in the gut or the tumor, and/or in the presence of metabolites that may or may not be present in vivo, and may be present in vitro during strain culture, expansion, production and/or manufacture, such as arabinose, cumate, and salicylate and others described herein. In some embodiments, the gene sequences(s) are controlled by a promoter inducible by such conditions and/or inducers. In some embodiments, the gene sequences(s) are controlled by a constitutive promoter, as described herein. In some embodiments, the gene sequences(s) are controlled by a constitutive promoter, and are expressed in in vivo conditions and/or in vitro conditions, e.g., during bacteria and/or other microorganismal expansion, production and/or manufacture, as described herein. In some embodiments, the gene sequences are present on one or more plasmids (e.g., high copy or low copy) or are integrated into one or more sites in the bacteria and/or other microorganism chromosome(s).

[0401] In any of these embodiments, the genetically engineered bacteria comprising gene sequence(s) encoding SIRPα or variants thereof or anti-CD47 polypeptides further comprise gene sequence(s) encoding one or more further effector molecule(s), i.e., therapeutic molecule(s) or a metabolic converter(s). In any of these embodiments, the circuit encoding SIRPα or variants thereof or anti-CD47 polypeptides may be combined with a circuit encoding one or more immune initiators or immune sustainers as described herein, in the same or a different bacterial strain (combination circuit or mixture of strains). The circuit encoding the immune initiators or immune sustainers may be under the control of a constitutive or inducible promoter, e.g., low oxygen inducible promoter or any other constitutive or inducible promoter described herein.

[0402] In any of these embodiments, the gene sequence(s) encoding SIRPα or variants thereof or anti-CD47 polypeptides may be combined with gene sequence(s) encoding one or more STING agonist producing enzymes, as described herein, in the same or a different bacterial strain (combination circuit or mixture of strains). In some embodiments, the gene sequences which are combined with the gene sequence(s) encoding SIRPα or variants thereof or anti-CD47 polypeptides encode DacA. DacA may be under the control of a constitutive or inducible promoter, e.g., low oxygen inducible promoter such as FNR or any other constitutive or inducible promoter described herein. In some embodiments, the dacA gene is integrated into the chromosome. In some embodiments, the gene sequences which are combined with the gene sequence(s) encoding SIRPα or variants thereof or anti-CD47 polypeptides encode cGAS. cGAS may be under the control of a constitutive or inducible promoter, e.g., low oxygen inducible promoter such as FNR or any other constitutive or inducible promoter described herein. In some embodiments, the gene encoding cGAS is integrated into the chromosome.

[0403] In any of these combination embodiments, the bacteria may further comprise an auxotrophic modification, e.g., a mutation or deletion in DapA, ThyA, or both. In any of these embodiments, the bacteria may further comprise a phage modification, e.g., a mutation or deletion, in an endogenous prophage as described herein.

[0404] In some embodiments, any one or more of the described circuits are present on one or more plasmids (e.g., high copy or low copy) or are integrated into one or more sites in the bacteria and/or other microorganism chromosome(s). Also, in some embodiments, the genetically engineered bacteria and/or other microorganisms are further capable of expressing any one or more of the described circuits and further comprise one or more of the following: (1) one or more auxotrophies, such as any auxotrophies known in the art and provided herein, e.g., thyA auxotrophy, (2) one or more kill switch circuits, such as any of the kill-switches described herein or otherwise known in the art, (3) one or more antibiotic resistance circuits, (4) one or more transporters for importing biological molecules or substrates, such any of the transporters described herein or otherwise known in the art, (5) one or more secretion circuits, such as any of the secretion circuits described herein and otherwise known in the art, (6) one or more surface display circuits, such as any of the surface display circuits described herein and otherwise known in the art (7) one or more circuits for the production or degradation of one or more metabolites (e.g., kynurenine, tryptophan, adenosine, arginine) described herein and (8) combinations of one or more of such additional circuits. In any of these embodiments, the genetically engineered bacteria may be administered alone or in combination with one or more immune checkpoint inhibitors described herein, including but not limited anti-CTLA4, anti-PD1, or anti-PD-L1 antibodies.

### Activation of Antigen Presenting Cells

### STING Agonists

[0405] Stimulator of interferon genes (STING) protein was shown to be a critical mediator of the signaling triggered by cytosolic nucleic acid derived from DNA viruses, bacteria, and tumor-derived DNA. The ability of STING to induce type I interferon production lead to studies in the context of antitumor immune response, and as a result, STING has emerged to be a potentially potent target in anti-tumor immunotherapies. A large part of the antitumor effects caused by STING activation may depend upon production of IFN-β by APCs and improved antigen presentation by these cells, which promotes CD8+ T cell priming against tumor-associated antigens. However, STING protein is also expressed broadly in a variety of cell types including myeloid-derived suppressor cells (MDSCs) and cancer cells themselves, in which the function of the pathway has not yet been well characterized (Sokolowska, O. & Nowis, D; STING Signaling in Cancer Cells: Important or Not?; Archivum Immunologiae et Therapiae Experimentalis; Arch. Immunol. Ther. Exp. (2018) 66: 125).

[0406] Stimulator of interferon genes (STING), also known as transmembrane protein 173 (TMEM173), mediator of interferon regulatory factor 3 activation (MITA), MPYS or endoplasmic reticulum interferon stimulator (ERIS), is a dimeric protein which is mainly expressed in macrophages, T cells, dendritic cells, endothelial cells, and certain fibroblasts and epithelial cells. STING plays an important role in the innate immune response—mice lacking STING are viable though prone to lethal infection following exposure to a variety of microbes. STING functions as a cytosolic receptor for the second messengers in the form of cytosolic cyclic dinucleotides (CDNs), such as cGAMP and the bacterial second messengers c-di-GMP and c-di-AMP. Upon stimulation by the CDN a conformational change in STING occurs. STING translocates from the ER to the Golgi apparatus and its carboxyterminus is liberated, This leads to the activation of TBK1 (TANK-binding kinase 1)/IRF3 (interferon regulatory factor 3), NF-κB, and STAT6 signal transduction pathways, and thereby promoting type I interferon and proinflammatory cytokine responses. CDNs include canonical cyclic di-GMP (c[G(30-50)pG(30-50)p] or cyclic di-AMP or cyclic GAMP (cGMP-AMP) (Barber, STING-dependent cytosolic DNA sensing pathways; Trends Immunol. 2014 Feb; 35(2):88-93).

[0407] CDNs can be exogenously (i.e., bacterially) and/or endogenously produced (i.e., within the host by a host enzyme upon exposure to dsDNA). STING is able to recognize various bacterial second messenger molecules cyclic diguanylate monophosphate (c-di-GMP) and cyclic diadenylate monophosphate (c-di-AMP), which triggers innate immune signaling response (Ma et al., The cGAS-STING Defense Pathway and Its Counteraction by Viruses; Cell Host & Microbe 19, Feb. 10, 2016). Additionally cyclic GMPAMP (cGAMP) can also bind to STING and result inactivation of IRF3 and β-interferon production. Both 3′5′-3′5′ cGAMP (3′3′ cGAMP) produced by Vibrio cholerae, and the metazoan secondary messenger cyclic [G(2′,5′)pA(3′5′)] (2′3′ cGAMP), could activate the innate immune response through STING pathway (Yi et al., Single Nucleotide Polymorphisms of Human STING Can Affect Innate Immune Response to Cyclic Dinucleotides; PLOS One (2013). 8(10)e77846, an references therein). Bacterial and metazoan (e.g., human) c-di-GAMP synthases (cGAS) utilizes GTP and ATP to generate cGAMP capable of STING activation. In contrast to prokaryotic CDNs, which have two canonical 30-50 phosphodiester linkages, the human cGAS product contains a unique 20-50 bond resulting in a mixed linkage cyclic GMP-AMP molecule, denoted as 2′,3′ cGAMP (as described in (Kranzusch et al., Ancient Origin of cGAS-STING Reveals Mechanism of Universal 2′,3′ cGAMP Signaling; Molecular Cell 59, 891-903, Sep. 17, 2015 and references therein). The bacterium Vibrio cholerae encodes an enzyme called DncV that is a structural homolog of cGAS and synthesizes a related second messenger with canonical 3′-5′ bonds (3′,3′ cGAMP).

[0408] Components of the stimulator of interferon genes (STING) pathway plays an important role in the detection of tumor cells by the immune system. In preclinical studies, cyclic dinucleotides (CDN), naturally occurring or rationally designed synthetic derivatives, are able to promote an aggressive antitumor response. For example, when co-formulated with an irradiated GM-CSF-secreting whole-cell vaccine in the form of STINGVAX, synthetic CDNs increased the antitumor efficacy and STINGVAX combined with PD-1 blockade induced regression of established tumors (Fu et al., STING agonist formulated cancer vaccines can cure established tumors resistant to PD-1 blockade; Sci Transl Med. 2015 Apr. 15; 7(283): 283ra52). In another example, Smith et al. conducted a study showing that STING agonists may augment CAR T therapy by stimulating the immune response to eliminate tumor cells that are not recognized by the adoptively transferred lymphocytes and thereby improve the effectiveness of CAR T cell therapy (Smith et al., Biopolymers co-delivering engineered T cells and STING agonists can eliminate heterogeneous tumors; J Clin Invest. 2017 Jun. 1; 127(6):2176-2191).

[0409] In some embodiments, the genetically engineered bacterium is capable of producing one or more STING agonists. Non limiting examples of STING agonists which can be produced by the genetically engineered bacteria of the disclosure include 3′3′ cGAMP, 2′3′cGAMP, 2′2′-cGAMP, 2′2′-cGAMP VacciGrade™ (Cyclic [G(2′,5′)pA(2′,5′)p]), 2′3′-cGAMP, 2′3′-cGAMP VacciGrade™ (Cyclic [G(2′,5′)pA(3′,5′)p]), 2′3′-cGAM(PS)2 (Rp/Sp), 3′3′-cGAMP, 3′3′-cGAMP VacciGrade™ (Cyclic [G(3′,5′)pA(3′,5′)p]), c-di-AMP, c-di-AMP VacciGrade™ (Cyclic diadenylate monophosphate Th1/Th2 response), 2′3′-c-di-AMP, 2′3′-c-di-AM(PS)2 (Rp,Rp) (Bisphosphorothioate analog of c-di-AMP, Rp isomers), 2′3′-c-di-AM(PS)2 (Rp,Rp) VacciGrade™, c-di-GMP, c-di-GMP VacciGrade™, 2′3′-c-di-GMP, and c-di-IMP. In some embodiments, the genetically engineered bacterium is that comprises a gene encoding one or more enzymes for the production of one or more STING agonists. Cyclic-di-GAMP synthase (cdi-GAMP synthase or cGAS) produces the cyclic-di-GAMP from one ATP and one GTP. In some embodiments, the enzymes are c-di-GAMP synthases (cGAS). In one embodiment, the genetically engineered bacteria comprise one or more gene sequences for the expression of an enzyme in class EC 2.7.7.86. In some embodiments, such enzymes are bacterial enzymes. In some embodiments, the enzyme is a bacterial c-di-GMP synthase. In some embodiments, the enzyme is a bacterial c-GAMP synthase (GMP-AMP synthase). In some embodiments, the bacteria are capable of producing 3′3′ c-dGAMP.

[0410] In some embodiments, the bacteria are capable of producing 3′3′-cGAMP. According to the instant disclosure several enzymes suitable for production of 3′3′-cGAMP from genetically engineered bacteria were identified. These enzymes include the Vibrio cholerae cGAS orthologs from Verminephrobacter eiseniae (EF01-2 Earthworm symbiont), Kingella denitrificans (ATCC 33394), and Neisseria bacilliformis (ATCC BAA-1200). Accordingly, in some embodiments, the genetically engineered bacteria comprise gene sequences encoding cGAS from Vibrio cholerae. Accordingly, in some embodiments, the genetically engineered bacteria comprise gene sequences encoding one or more Vibrio cholerae cGAS orthologs from species selected from Verminephrobacter eiseniae (EF01-2 Earthworm symbiont), Kingella denitrificans (ATCC 33394), and Neisseria bacilliformis (ATCC BAA-1200). In some embodiments, the bacteria comprise a gene sequence encoding DncV. In some embodiments, DncV is from Vibrio cholerae. In one embodiment, the DncV orthrolog is from Verminephrobacter eiseniae. In one embodiment, the DncV orthrolog is from Kingella denitrificans. In one embodiment, the DncV orthrolog is from Neisseria bacilliformis. In some embodiments, the genetically engineered bacteria comprise a gene sequence encoding a DncV ortholog from a species selected from Enhydrobacter aerosaccus, Kingella denitrificans, Neisseria bacilliformis, Phaeobacter gallaeciensi, Citromicrobium sp., Roseobacter litoralis, Roseovarius sp., Methylobacterium populi, Erythrobacter sp., Erythrobacter litoralis, Methylophaga thiooxydans, Methylophaga thiooxydans, Herminiimonas arsenicoxydans, Verminephrobacter eiseniae, Methylobacter tundripaludum, Psychrobacter arcticus, Vibrio cholerae, Vibrio sp, Aeromonas salmonicida, Serratia odorifera, Verminephrobacter eiseniae, and Methylovorus glucosetrophus.

[0411] In some embodiments, the genetically engineered bacteria are capable of producing 2′3′-cGAMP. Human cGAS is known to produce 2′3′-cGAM P. In some embodiments, the genetically engineered bacteria comprise gene sequences encoding human cGAS.

[0412] In some embodiments, the genetically engineered bacteria are capable of increasing c-GAMP (2′3′ or 3′3′) levels in the tumor microenvironment. In some embodiments, the genetically engineered bacteria are capable of increasing c-GAMP levels in the intracellular space In some embodiments, the genetically engineered bacteria are capable of increasing c-GAMP levels inside of a eukaryotic cell. In some embodiments, the genetically engineered bacteria are capable of increasing c-GAMP (2′3′ or 3′3′) levels inside of an immune cell. In some embodiments, the cell is a phagocyte. In some embodiments, the cell is a macrophage. In some embodiments, the cell is a dendritic cell. In some embodiments, the cell is a neutrophil. In some embodiments, the cell is a MDSC. In some embodiments, the genetically engineered bacteria are capable of increasing c-GAMP (2′3′ or 3′3′) inside of a cancer cell. In some embodiments, the genetically engineered bacteria are capable of increasing c-GAMP levels in vitro in the bacterial cell and/or in the growth medium.

[0413] In one embodiment, the genetically engineered bacteria comprise gene sequence(s) encoding bacterial c-di-GAMP synthase from Vibrio cholerae. In some embodiments, the enzyme is DncV.

[0414] In one embodiment, the genetically engineered bacteria comprise gene sequence(s) encoding c-di-AMP synthase from Verminephrobacter eiseniae. In one embodiment, the bacterial c-di-GAMP synthase is DcnV ortholog from Verminephrobacter eiseniae (EF01-2 Earthworm symbiont). In some embodiments, the genetically engineered bacteria comprise c-di-GAMP synthase gene sequence(s) encoding one or more polypeptide(s) comprising SEQ ID NO: 1262 or functional fragments thereof. In some embodiments, genetically engineered bacteria comprise a gene sequence encoding a polypeptide that has at least about 80%, at least about 85%, at least about 90%, at least about 95%, or at least about 99% identity to SEQ ID NO: 1262 or a functional fragment thereof. In some embodiments, the polypeptide has at least about 85%, 86%, 87%, 88%, 89%, 90%, 91%, 92%, 93%, 94%, 95%, 96%, 97%, 98%, or 99% identity with SEQ ID NO: 1262. In some specific embodiments, the polypeptide comprises SEQ ID NO: 1262. In other specific embodiments, the polypeptide consists of SEQ ID NO: 1262. In certain embodiments, the bacterial c-di-GAMP synthase gene sequence has at least about 80% identity with SEQ ID NO: 1265. In certain embodiments, the gene sequence has at least about 90% identity with SEQ ID NO: 1265. In certain embodiments, the gene sequence has at least about 95% identity with SEQ ID NO: 1265. In some embodiments, the gene sequence has at least about 85%, 86%, 87%, 88%, 89%, 90%, 91%, 92%, 93%, 94%, 95%, 96%, 97%, 98%, or 99% identity with SEQ ID NO: 1265. In some specific embodiments, the gene sequence comprises SEQ ID NO: 1265. In other specific embodiments, the gene sequence consists of SEQ ID NO: 1265.

[0415] In one embodiment, the genetically engineered bacteria comprise gene sequence(s) encoding c-di-AMP synthase from Kingella denitrificans (ATCC 33394). In one embodiment, the bacterial c-di-GAMP synthase is DcnV ortholog from Kingella denitrificans. In some embodiments, the genetically engineered bacteria comprise c-di-GAMP synthase gene sequence(s) encoding one or more polypeptide(s) comprising SEQ ID NO: 1260 or functional fragments thereof. In some embodiments, genetically engineered bacteria comprise a gene sequence encoding a polypeptide that has at least about 80%, at least about 85%, at least about 90%, at least about 95%, or at least about 99% identity to SEQ ID NO: 1260 or a functional fragment thereof. In some embodiments, the polypeptide has at least about 85%, 86%, 87%, 88%, 89%, 90%, 91%, 92%, 93%, 94%, 95%, 96%, 97%, 98%, or 99% identity with SEQ ID NO: 1260. In some specific embodiments, the polypeptide comprises SEQ ID NO: 1260. In other specific embodiments, the polypeptide consists of SEQ ID NO: 1260. In certain embodiments, the bacterial c-di-GAMP synthase gene sequence has at least about 80% identity with SEQ ID NO: 1263. In certain embodiments, the gene sequence has at least about 90% identity with SEQ ID NO: 1263. In certain embodiments, the gene sequence has at least about 95% identity with SEQ ID NO: 1263. In some embodiments, the gene sequence has at least about 85%, 86%, 87%, 88%, 89%, 90%, 91%, 92%, 93%, 94%, 95%, 96%, 97%, 98%, or 99% identity with SEQ ID NO: 1263. In some specific embodiments, the gene sequence comprises SEQ ID NO: 1263. In other specific embodiments, the gene sequence consists of SEQ ID NO: 1263.

[0416] In one embodiment, the genetically engineered bacteria comprise gene sequence(s) encoding c-di-AMP synthase from Neisseria bacilliformis (ATCC BAA-1200). In one embodiment, the bacterial c-di-GAMP synthase is DcnV ortholog from Neisseria bacilliformis. In some embodiments, the genetically engineered bacteria comprise c-di-GAMP synthase gene sequence(s) encoding one or more polypeptide(s) comprising SEQ ID NO: 1261 or functional fragments thereof. In some embodiments, genetically engineered bacteria comprise a gene sequence encoding a polypeptide that is at least about 80%, at least about 85%, at least about 90%, at least about 95%, or at least about 99% identity to SEQ ID NO: 1261 or a functional fragment thereof. In some embodiments, the polypeptide has at least about 85%, 86%, 87%, 88%, 89%, 90%, 91%, 92%, 93%, 94%, 95%, 96%, 97%, 98%, or 99% identity with SEQ ID NO: 1261. In some specific embodiments, the polypeptide comprises SEQ ID NO: 1261. In other specific embodiments, the polypeptide consists of SEQ ID NO: 1261. In certain embodiments, the c-di-GAMP synthase sequence has at least about 80% identity with SEQ ID NO: 1264. In certain embodiments, the gene sequence has at least about 90% identity with SEQ ID NO: 1264. In certain embodiments, the gene sequence has at least about 95% identity with SEQ ID NO: 1264. In some embodiments, the gene sequence has at least about 85%, 86%, 87%, 88%, 89%, 90%, 91%, 92%, 93%, 94%, 95%, 96%, 97%, 98%, or 99% identity with SEQ ID NO: 1264. In some specific embodiments, the gene sequence comprises SEQ ID NO: 1264. In other specific embodiments, the gene sequence consists of SEQ ID NO: 1264.

[0417] In one embodiment, the genetically engineered bacteria comprise gene sequence(s) encoding mammalian c-di-GAMP enzymes. In some embodiments, the STING agonist producing enzymes are human enzymes. In some embodiments, the gene sequence(s) are codon-optimized for expression in a microorganism host cell. In one embodiment, the genetically engineered bacteria comprise gene sequence(s) encoding the human polypeptide cGAS. In some embodiments, the genetically engineered bacteria comprise human cGAS gene sequence(s) encoding one or more polypeptide(s) comprising SEQ ID NO: 1254 or functional fragments thereof. In some embodiments, genetically engineered bacteria comprise a gene sequence encoding a polypeptide that is at least about 80%, at least about 85%, at least about 90%, at least about 95%, or at least about 99% identity to SEQ ID NO: 1254 or a functional fragment thereof. In some embodiments, the polypeptide has at least about 85%, 86%, 87%, 88%, 89%, 90%, 91%, 92%, 93%, 94%, 95%, 96%, 97%, 98%, or 99% identity with SEQ ID NO: 1254. In some specific embodiments, the polypeptide comprises SEQ ID NO: 1254. In other specific embodiments, the polypeptide consists of SEQ ID NO: 1254. In certain embodiments, the human cGAS sequence has at least about 80% identity with SEQ ID NO: 1255. In certain embodiments, the gene sequence has at least about 90% identity with SEQ ID NO: 1255. In certain embodiments, the gene sequence has at least about 95% identity with SEQ ID NO: 1255. In some embodiments, the gene sequence has at least about 85%, 86%, 87%, 88%, 89%, 90%, 91%, 92%, 93%, 94%, 95%, 96%, 97%, 98%, or 99% identity with SEQ ID NO: 1255. In some specific embodiments, the gene sequence comprises SEQ ID NO: 1264. In other specific embodiments, the gene sequence consists of SEQ ID NO: 1255.

[0418] In some embodiments, the bacteria are capable of producing cyclic-di-GMP. Accordingly, in some embodiments, the genetically engineered bacteria comprise gene sequence(s) encoding one or more diguanylate cyclase(s).

[0419] In some embodiments, the genetically engineered bacteria are capable of increasing cyclic-di-GMP levels in the tumor microenvironment. In some embodiments, the genetically engineered bacteria are capable of increasing cyclic-di-GMP levels in the intracellular space In some embodiments, the genetically engineered bacteria are capable of increasing cyclic-di-GMP levels inside of a eukaryotic cell. In some embodiments, the genetically engineered bacteria are capable of increasing cyclic-di-GMP levels inside of an immune cell. In some embodiments, the cell is a phagocyte. In some embodiments, the cell is a macrophage. In some embodiments, the cell is a dendritic cell. In some embodiments, the cell is a neutrophil. In some embodiments, the cell is a MDSC. In some embodiments, the genetically engineered bacteria are capable of increasing c cyclic-di-GMP levels inside of a cancer cell. In some embodiments, the genetically engineered bacteria are capable of increasing c-GMP levels in vitro in the bacterial cell and/or in the growth medium.

[0420] In some embodiments, the genetically engineered bacteria are capable of producing c-diAMP. Diadenylate cyclase produces one molecule cyclic-di-AMP from two ATP molecules. In one embodiment, the genetically engineered bacteria comprise one or more gene sequences for the expression of a diadenylate cyclase. In one embodiment, the genetically engineered bacteria comprise one or more gene sequences for the expression of an enzyme in class EC 2.7.7.85. In one embodiment, the diadenylate cyclase is a bacterial diadenylate cyclase. In one embodiment, the diadenylate cyclase is DacA. In one embodiment, the DacA is from Listeria monocytogenes.

[0421] In some embodiments, the genetically engineered bacteria comprise DacA gene sequence(s) encoding one or more polypeptide(s) comprising SEQ ID NO: 1257 or functional fragments thereof. In some embodiments, genetically engineered bacteria comprise a gene sequence encoding a polypeptide that has at least about 80%, at least about 85%, at least about 90%, at least about 95%, or at least about 99% identity to SEQ ID NO: 1257 or a functional fragment thereof. In some embodiments, the polypeptide has at least about 85%, 86%, 87%, 88%, 89%, 90%, 91%, 92%, 93%, 94%, 95%, 96%, 97%, 98%, or 99% identity with SEQ ID NO: 1257. In some specific embodiments, the polypeptide comprises SEQ ID NO: 1257. In other specific embodiments, the polypeptide consists of SEQ ID NO: 1257. In certain embodiments, the Dac A sequence has at least about 80% identity with SEQ ID NO: 1258. In certain embodiments, the gene sequence has at least about 90% identity with SEQ ID NO: 1258. In certain embodiments, the gene sequence has at least about 95% identity with SEQ ID NO: 1258. In some embodiments, the gene sequence has at least about 85%, 86%, 87%, 88%, 89%, 90%, 91%, 92%, 93%, 94%, 95%, 96%, 97%, 98%, or 99% identity with SEQ ID NO: 1258. In some specific embodiments, the gene sequence comprises SEQ ID NO: 1258. In other specific embodiments, the gene sequence consists of SEQ ID NO: 1258.

[0422] In some embodiments, the genetically engineered bacteria comprise DacA gene sequence(s) operably linked to a promoter which is inducible under low oxygen conditions, e.g., an FNR inducible promoter as described herein. In certain embodiments, the sequence of the DacA gene operably linked to the FNR inducible promoter has at least about 80% identity with SEQ ID NO: 1284. In certain embodiments, the sequence of the DacA gene operably linked to the FNR inducible promoter has at least about 90% identity with SEQ ID NO: 1258. In certain embodiments, the sequence of the DacA gene operably linked to the FNR inducible promoter has at least about 95% identity with SEQ ID NO: 1258. In some embodiments, the sequence of the DacA gene operably linked to the FNR inducible promoter has at least about 85%, 86%, 87%, 88%, 89%, 90%, 91%, 92%, 93%, 94%, 95%, 96%, 97%, 98%, or 99% identity with SEQ ID NO: 1258. In some specific embodiments, the sequence of the DacA gene operably linked to the FNR inducible promoter comprises SEQ ID NO: 1258. In other specific embodiments the sequence of the DacA gene operably linked to the FNR inducible promoter consists of SEQ ID NO: 1258.

[0423] Other suitable diadenylate cyclases are known in the art and include those include in the EggNog database (http://eggnogdb.embl.de). Non-limiting examples of diadenylate cyclases which can be expressed by the bacteria include Megasphaera sp. UPII 135-E (HMPREF1040_0026), Streptococcus anginosus SK52=DSM 20563 (HMPREF9966_0555), Streptococcus mitis by. 2 str. SK95 (HMPREF9965_1675), Streptococcus infantis SK1076 (HMPREF9967_1568), Acetonema longum DSM 6540 (ALO_03356), Sporosarcina newyorkensis 2681 (HMPREF9372_2277), Listeria monocytogenes str. Scott A (BN418_2551), Candidatus Arthromitus sp. SFB-mouse-Japan (SFBM_1354), Haloplasma contractile SSD-17B 2 seqs HLPCO_01750, HLPCO_08849), Lactobacillus kefiranofaciens ZW3 (WANG_0941), Mycoplasma anatis 1340 (GIG_03148), Streptococcus constellatus subsp. pharyngis SK1060=CCUG 46377 (HMPREF1042_1168), Streptococcus infantis SK970 (HMPREF9954_1628), Paenibacillus mucilaginosus KNP414 (YBBP), Nostoc sp. PCC 7120 (ALL2996), Mycoplasma columbinum SF7 (MCSF7_01321), Lactobacillus ruminis SPM0211 (LRU_01199), Candidatus Arthromitus sp. SFB-rat-Yit (RATSFB_1182), Clostridium sp. SY8519 (CXIVA_02190), Brevibacillus laterosporus LMG 15441 (BRLA_CO2240), Weissella koreensis KACC 15510 (WKK_01955), Brachyspira intermedia PWS/A (BINT_2204), Bizionia argentinensis JUB59 (BZARG_2617), Streptococcus salivarius 57.1 (SSAL_01348), Alicyclobacillus acidocaldarius subsp. acidocaldarius Tc-4-1 (TC41_3001), Sulfobacillus acidophilus TPY (TPY_0875), Streptococcus pseudopneumoniae IS7493 (SPPN_07660), Megasphaera elsdenii DSM 20460 (MELS_0883), Streptococcus infantarius subsp. infantarius CJ18 (SINF_1263), Blattabacterium sp. (Mastotermes darwiniensis) str. MADAR (MADAR_511), Blattabacterium sp. (Cryptocercus punctulatus) str. Cpu (BLBCPU_093), Synechococcus sp. CC9605 (SYNCC9605_1630), Thermus sp. CCB_US3_UF1 (AEV17224.1), Mycoplasma haemocanis str. Illinois (MHC_04355), Streptococcus macedonicus ACA-DC 198 (YBBP), Mycoplasma hyorhinis GDL-1 (MYM_0457), Synechococcus elongatus PCC 7942 (SYNPCC7942_0263), Synechocystis sp. PCC 6803 (SLL0505), Chlamydophila pneumoniae CWL029 (YBBP), Microcoleus chthonoplastes PCC 7420 (MC7420_6818), Persephonella marina EX-H1 (PERMA_1676), Desulfitobacterium hafniense Y51 (DSY4489), Prochlorococcus marinus str. AS9601 (A9601_11971), Flavobacteria bacterium BBFL7 (BBFL7_02553), Sphaerochaeta globus str. Buddy (SPIBUDDY_2293), Sphaerochaeta pleomorpha str. Grapes (SPIGRAPES_2501), Staphylococcus aureus subsp. aureus Mu50 (SAV2163), Streptococcus pyogenes M1 GAS (SPY_1036), Synechococcus sp. WH 8109 (SH8109_2193), Prochlorococcus marinus subsp. marinus str. CCMP1375 (PRO_1104), Prochlorococcus marinus str. MIT 9515 (P9515_11821), Prochlorococcus marinus str. MIT 9301 (P9301_11981), Prochlorococcus marinus str. NATL1A (NATL1_14891), Listeria monocytogenes EGD-e (LMO2120), Streptococcus pneumoniae TIGR4 2 seqs SPNET_02000368, SP_1561), Streptococcus pneumoniae R6 (SPR1419), Staphylococcus epidermidis RP62A (SERP1764), Staphylococcus epidermidis ATCC 12228 (SE_1754), Desulfobacterium autotrophicum HRM2 (HRM2_32880), Desulfotalea psychrophila LSv54 (DP1639), Cyanobium sp. PCC 7001 (CPCC7001_1029), Chlamydophila pneumoniae TW-183 (YBBP), Leptospira interrogans serovar Lai str. 56601 (LA_3304), Clostridium perfringens ATCC 13124 (CPF_2660), Thermosynechococcus elongatus BP-1 (TLR1762), Bacillus anthracis str. Ames (BA_0155), Clostridium thermocellum ATCC 27405 (CTHE_1166), Leuconostoc mesenteroides subsp. mesenteroides ATCC 8293 (LEUM_1568), Oenococcus oeni PSU-1 (OEOE_1656), Trichodesmium erythraeum IMS101 (TERY_2433), Tannerella forsythia ATCC 43037 (BFO_1347), Sulfurihydrogenibium azorense Az-Fu1 (SULAZ_1626), Candidatus Koribacter versatilis Ellin345 (ACID345_0278), Desulfovibrio alaskensis G20 (DDE_1515), Carnobacterium sp. 17-4 (YBBP), Streptococcus mutans UA159 (SMU_1428 C), Mycoplasma agalactiae (MAG3060), Streptococcus agalactiae NEM316 (GBS0902), Clostridium tetani E88 (CTC_02549), Ruminococcus champanellensis 18P13 (RUM_14470), Croceibacter atlanticus HTCC2559 (CA2559_13513), Streptococcus uberis 0140J (SUB1092), Chlamydophila abortus S26/3 (CAB642), Lactobacillus plantarum WCFS1 (LP_0818), Oceanobacillus iheyensis HTE831 (OB0230), Synechococcus sp. RS9916 (RS9916_31367), Synechococcus sp. RS9917 (RS9917_00967), Bacillus subtilis subsp. subtilis str. 168 (YBBP), Aquifex aeolicus VF5 (AQ_1467), Borrelia burgdorferi B31 (BB_0008), Enterococcus faecalis V583 (EF_2157), Bacteroides thetaiotaomicron VPI-5482 (BT_3647), Bacillus cereus ATCC 14579 (BC_0186), Chlamydophila caviae GPIC (CCA_00671), Synechococcus sp. CB0101 (SCB01_010100000902), Synechococcus sp. CB0205 (SCB02_010100012692), Candidatus Solibacter usitatus Ellin6076 (ACID_1909), Geobacillus kaustophilus HTA426 (GKO152), Verrucomicrobium spinosum DSM 4136 (VSPID_010100022530), Anabaena variabilis ATCC 29413 (AVA_0913), Porphyromonas gingivalis W83 (PG_1588), Chlamydia muridarum Nigg (TC_0280), Deinococcus radiodurans R1 (DR_0007), Geobacter sulfurreducens PCA 2 seqs GSU1807, GSU0868), Mycoplasma arthritidis 158L3-1 (MARTH_ORF527), Mycoplasma genitalium G37 (MG105), Treponema denticola ATCC 35405 (TDE_1909), Treponema pallidum subsp. pallidum str. Nichols (TP_0826), butyrate-producing bacterium SS3/4 (CK3_23050), Carboxydothermus hydrogenoformans Z-2901 (CHY_2015), Ruminococcus albus 8 (CUS_5386), Streptococcus mitis NCTC 12261 (SM12261_1151), Gloeobacter violaceus PCC 7421 (GLL0109), Lactobacillus johnsonii NCC 533 (LJ_0892), Exiguobacterium sibiricum 255-15 (EXIG_0138), Mycoplasma hyopneumoniae J (MHJ_0485), Mycoplasma synoviae 53 (MS53_0498), Thermus thermophilus HB27 (TT_C1660), Onion yellows phytoplasma OY-M (PAM_584), Streptococcus thermophilus LMG 18311 (OSSG), Candidatus Protochlamydia amoebophila UWE25 (PC1633), Chlamydophila felis Fe/C-56 (CF0340), Bdellovibrio bacteriovorus HD100 (BD1929), Prevotella ruminicola 23 (PRU_2261), Moorella thermoacetica ATCC 39073 (MOTH_2248), Leptospira interrogans serovar Copenhageni str. Fiocruz L1-130 (LIC_10844), Mycoplasma mobile 163K (MMOB4550), Synechococcus elongatus PCC 6301 (SYC1250_C), Cytophaga hutchinsonii ATCC 33406 (CHU_3222), Geobacter metallireducens GS-15 2 seqs GMET_1888, GMET_1168), Bacillus halodurans C-125 (BH0265), Bacteroides fragilis NCTC 9343 (BF0397), Chlamydia trachomatis D/UW-3/CX (YBBP), Clostridium acetobutylicum ATCC 824 (CA_C3079), Clostridium difficile 630 (CD0110), Lactobacillus acidophilus NCFM (LBA0714), Lactococcus lactis subsp. lactis 111403 (YEDA), Listeria innocua Clip11262 (L1N2225), Mycoplasma penetrans HF-2 (MYPE2120), Mycoplasma pulmonis UAB CTIP (MYPU_4070), Thermoanaerobacter tengcongensis MB4 (TTE2209), Pediococcus pentosaceus ATCC 25745 (PEPE_0475), Bacillus licheniformis DSM 13=ATCC 14580 2 seqs YBBP, BL02701), Staphylococcus haemolyticus JCSC1435 (SH0877), Desulfuromonas acetoxidans DSM 684 (DACE_0543), Thermodesulfovibrio yellowstonii DSM 11347 (THEYE_A0044), Mycoplasma bovis PG45 (MBOVPG45_0394), Anaeromyxobacter dehalogenans 2CP-C(ADEH_1497), Clostridium beijerinckii NCIMB 8052 (CBEI_0200), Borrelia garinii PBi (BG0008), Symbiobacterium thermophilum IAM 14863 (STH192), Alkaliphilus metalliredigens QYMF (AMET_4313), Thermus thermophilus HB8 (TTHA0323), Coprothermobacter proteolyticus DSM 5265 (COPRO5265_1086), Thermomicrobium roseum DSM 5159 (TRD_0688), Salinibacter ruber DSM 13855 (SRU_1946), Dokdonia donghaensis MED134 (MED134_03354), Polaribacter irgensii 23-P (P123P_01632), Psychroflexus torquis ATCC 700755 (P700755_02202), Robiginitalea biformata HTCC2501 (RB2501_10597), Polaribacter sp. MED152 (MED152_11519), Maribacter sp. HTCC2170 (FB2170_01652), Microscilla marina ATCC 23134 (M23134_07024), Lyngbya sp. PCC 8106 (L8106_18951), Nodularia spumigena CCY9414 (N9414_23393), Synechococcus sp. BL107 (BL107_11781), Bacillus sp. NRRL B-14911 (B14911_19485), Lentisphaera araneosa HTCC2155 (LNTAR_18800), Lactobacillus sakei subsp. sakei 23K (LCA_1359), Mariprofundus ferrooxydans PV-1 (SPV1_13417), Borrelia hermsii DAH (BH0008), Borrelia turicatae 91E135 (BT0008), Bacillus weihenstephanensis KBAB4 (BCERKBAB4_0149), Bacillus cytotoxicus NVH 391-98 (BCER98_0148), Bacillus pumilus SAFR-032 (YBBP), Geobacter sp. FRC-32 2 seqs GEOB_2309, GEOB_3421), Herpetosiphon aurantiacus DSM 785 (HAUR_3416), Synechococcus sp. RCC307 (SYNRCC307_0791), Synechococcus sp. CC9902 (SYNCC9902_1392), Deinococcus geothermalis DSM 11300 (DGEO_0135), Synechococcus sp. PCC 7002 (SYNPCC7002_A0098), Synechococcus sp. WH 7803 (SYNWH7803_1532), Pedosphaera parvula Ellin514 (CFLAV_PD5552), Synechococcus sp. JA-3-3Ab (CYA_2894), Synechococcus sp. JA-2-3Ba(2-13) (CYB_1645), Aster yellows witches-broom phytoplasma AYWB (AYWB_243), Paenibacillus sp. JDR-2 (PJDR2_5631), Chloroflexus aurantiacus J-10-fl (CAUR_1577), Lactobacillus gasseri ATCC 33323 (LGAS_1288), Bacillus amyloliquefaciens FZB42 (YBBP), Chloroflexus aggregans DSM 9485 (CAGG_2337), Acaryochloris marina MBIC11017 (AM1_0413), Blattabacterium sp. (Blattella germanica) str. Bge (BLBBGE_101), Simkania negevensis Z (YBBP), Chlamydophila pecorum E58 (G5S_1046), Chlamydophila psittaci 6BC 2 seqs CPSIT_0714, G50_0707), Carnobacterium sp. AT7 (CAT7_06573), Finegoldia magna ATCC 29328 (FMG_1225), Syntrophomonas wolfei subsp. wolfei str. Goettingen (SWOL_2103), Syntrophobacter fumaroxidans MPOB (SFUM_3455), Pelobacter carbinolicus DSM 2380 (PCAR_0999), Pelobacter propionicus DSM 2379 2 seqs PPRO_2640, PPRO_2254), Thermoanaerobacter pseudethanolicus ATCC 33223 (TETH39_0457), Victivallis vadensis ATCC BAA-548 (VVAD_PD2437), Staphylococcus saprophyticus subsp. saprophyticus ATCC 15305 (SSP0722), Bacillus coagulans 36D1 (BCOA_1105), Mycoplasma hominis ATCC 23114 (MHO_0510), Lactobacillus reuteri 100-23 (LREU23DRAFT_3463), Desulfotomaculum reducens MI-1 (DRED_0292), Leuconostoc citreum KM20 (LCK_01297), Paenibacillus polymyxa E681 (PPE_04217), Akkermansia muciniphila ATCC BAA-835 (AMUC_0400), Alkaliphilus oremlandii OhILAs (CLOS_2417), Geobacter uraniireducens Rf4 2 seqs GURA_1367, GURA_2732), Caldicellulosiruptor saccharolyticus DSM 8903 (CSAC_1183), Pyramidobacter piscolens W5455 (HMPREF7215_0074), Leptospira borgpetersenii serovar Hardjo-bovis L550 (LBL_0913), Roseiflexus sp. RS-1 (ROSERS_1145), Clostridium phytofermentans ISDg (CPHY_3551), Brevibacillus brevis NBRC 100599 (BBR47_02670), Exiguobacterium sp. AT1b (EAT1B_1593), Lactobacillus salivarius UCC118 (LSL_1146), Lawsonia intracellularis PHE/MN1-00 (110190), Streptococcus mitis B6 (SMI_1552), Pelotomaculum thermopropionicum SI (PTH_0536), Streptococcus pneumoniae D39 (SPD_1392), Candidatus Phytoplasma mali (ATP_00312), Gemmatimonas aurantiaca T-27 (GAU_1394), Hydrogenobaculum sp. YO4AAS1 (HY04AAS1_0006), Roseiflexus castenholzii DSM 13941 (RCAS_3986), Listeria welshimeri serovar 6b str. SLCC5334 (LWE2139), Clostridium novyi NT (NT01CX_1162), Lactobacillus brevis ATCC 367 (LVIS_0684), Bacillus sp. B14905 (BB14905_08668), Algoriphagus sp. PR1 (ALPR1_16059), Streptococcus sanguinis SK36 (SSA_0802), Borrelia afzelii PKo 2 seqs BAPKO_0007, AEL69242.1), Lactobacillus delbrueckii subsp. bulgaricus ATCC 11842 (LDB0651), Streptococcus suis 05ZYH33 (SSU05_1470), Kordia algicida OT-1 (KAOT1_10521), Pedobacter sp. BAL39 (PBAL39_03944), Flavobacteriales bacterium ALC-1 (FBALC1_04077), Cyanothece sp. CCY0110 (CY0110_30633), Plesiocystis pacifica SIR-1 (PPSIR1_10140), Clostridium cellulolyticum H10 (CCEL_1201), Cyanothece sp. PCC 7425 (CYAN7425_4701), Staphylococcus carnosus subsp. carnosus TM300 (SCA_1665), Bacillus pseudofirmus OF4 (YBBP), Leeuwenhoekiella blandensis MED217 (MED217_04352), Geobacter lovleyi SZ 2 seqs GLOV_3055, GLOV_2524), Streptococcus equi subsp. zooepidemicus (SEZ_1213), Thermosinus carboxydivorans Nor1 (TCARDRAFT_1045), Geobacter bemidjiensis Bem (GBEM_0895), Anaeromyxobacter sp. Fw109-5 (ANAE109_2336), Lactobacillus helveticus DPC 4571 (LHV_0757), Bacillus sp. m3-13 (BM3-1_010100010851), Gramella forsetii KT0803 (GFO_0428), Ruminococcus obeum ATCC 29174 (RUMOBE_03597), Ruminococcus torques ATCC 27756 (RUMTOR_00870), Dorea formicigenerans ATCC 27755 (DORFOR_00204), Dorea longicatena DSM 13814 (DORLON_01744), Eubacterium ventriosum ATCC 27560 (EUBVEN_01080), Desulfovibrio piger ATCC 29098 (DESPIG_01592), Parvimonas micra ATCC 33270 (PEPMIC_01312), Pseudoflavonifractor capillosus ATCC 29799 (BACCAP_01950), Clostridium scindens ATCC 35704 (CLOSCI_02389), Eubacterium hallii DSM 3353 (EUBHAL_01228), Ruminococcus gnavus ATCC 29149 (RUMGNA_03537), Subdoligranulum variabile DSM 15176 (SUBVAR_05177), Coprococcus eutactus ATCC 27759 (COPEUT_01499), Bacteroides ovatus ATCC 8483 (BACOVA_03480), Parabacteroides merdae ATCC 43184 (PARMER_03434), Faecalibacterium prausnitzii A2-165 (FAEPRAA2165_01954), Clostridium sp. L2-50 (CLOL250_00341), Anaerostipes caccae DSM 14662 (ANACAC_00219), Bacteroides caccae ATCC 43185 (BACCAC_03225), Clostridium bolteae ATCC BAA-613 (CLOBOL_04759), Borrelia duttonii Ly (BDU_14), Cyanothece sp. PCC 8801 (PCC8801_0127), Lactococcus lactis subsp. cremoris MG1363 (LLMG_0448), Geobacillus thermodenitrificans NG80-2 (GTNG_0149), Epulopiscium sp. N.t. morphotype B (EPULO_010100003839), Lactococcus garvieae Lg2 (LCGL_0304), Clostridium leptum DSM 753 (CLOLEP_03097), Clostridium spiroforme DSM 1552 (CLOSPI_01608), Eubacterium dolichum DSM 3991 (EUBDOL_00188), Clostridium kluyveri DSM 555 (CKL_0313), Porphyromonas gingivalis ATCC 33277 (PGN_0523), Bacteroides vulgatus ATCC 8482 (BVU_0518), Parabacteroides distasonis ATCC 8503 (BDI_3368), Staphylococcus hominis subsp. hominis C80 (HMPREF0798_01968), Staphylococcus caprae C87 (HMPREF0786_02373), Streptococcus sp. C150 (HMPREF0848_00423), Sulfurihydrogenibium sp. YO3AOP1 (SYO3AOP1_0110), Desulfatibacillum alkenivorans AK-01 (DALK_0397), Bacillus selenitireducens MLS10 (BSEL_0372), Cyanothece sp. ATCC 51142 (CCE_1350), Lactobacillus jensenii 1153 (LBJG_01645), Acholeplasma laidlawii PG-8A (ACL_1368), Bacillus coahuilensis m4-4 (BCOAM_010100001120), Geobacter sp. M18 2 seqs GM18_0792, GM18_2516), Lysinibacillus sphaericus C3-41 (BSPH_4568), Clostridium botulinum NCTC 2916 (CBN_3506), Clostridium botulinum C str. Eklund (CBC_A1575), Alistipes putredinis DSM 17216 (ALIPUT_00190), Anaerofustis stercorihominis DSM 17244 (ANASTE_01539), Anaerotruncus colihominis DSM 17241 (ANACOL_02706), Clostridium bartlettii DSM 16795 (CLOBAR_00759), Clostridium ramosum DSM 1402 (CLORAM_01482), Borrelia valaisiana VS116 (BVAVS116_0007), Sorangium cellulosum So ce 56 (SCE7623), Microcystis aeruginosa NIES-843 (MAE_25390), Bacteroides stercoris ATCC 43183 (BACSTE_02634), Candidatus Amoebophilus asiaticus 5a2 (AASI_0652), Leptospira biflexa serovar Patoc strain Patoc 1 (Paris) (LEPBI_I0735), Clostridium sp. 7_2_43 FAA (CSBG_00101), Desulfovibrio sp. 3_1_syn3 (HMPREF0326_02254), Ruminococcus sp. 5_1_39 BFAA (RSAG_02135), Clostridiales bacterium 1_7_47 FAA (CBFG_00347), Bacteroides fragilis 3_1_12 (BFAG_02578), Natranaerobius thermophilus JW/NM-WN-LF (NTHER_0240), Macrococcus caseolyticus JCSC5402 (MCCL_0321), Streptococcus gordonii str. Challis substr. CH1 (SGO_0887), Dethiosulfovibrio peptidovorans DSM 11002 (DPEP_2062), Coprobacillus sp. 29_1 (HMPREF9488_03448), Bacteroides coprocola DSM 17136 (BACCOP_03665), Coprococcus comes ATCC 27758 (COPCOM_02178), Geobacillus sp. WCH70 (GWCH70_0156), uncultured Termite group 1 bacterium phylotype Rs-D17 (TGRD_209), Dyadobacter fermentans DSM 18053 (DFER_0224), Bacteroides intestinalis DSM 17393 (BACINT_00700), Ruminococcus lactaris ATCC 29176 (RUMLAC_01257), Blautia hydrogenotrophica DSM 10507 (RUMHYD_01218), Candidatus Desulforudis audaxviator MP104C (DAUD_1932), Marvinbryantia formatexigens DSM 14469 (BRYFOR_07410), Sphaerobacter thermophilus DSM 20745 (STHE_1601), Veillonella parvula DSM 2008 (VPAR_0292), Methylacidiphilum infernorum V4 (MINF_1897), Paenibacillus sp. Y412MC10 (GYMC10_5701), Bacteroides finegoldii DSM 17565 (BACFIN_07732), Bacteroides eggerthii DSM 20697 (BACEGG_03561), Bacteroides pectinophilus ATCC 43243 (BACPEC_02936), Bacteroides plebeius DSM 17135 (BACPLE_00693), Desulfohalobium retbaense DSM 5692 (DRET_1725), Desulfotomaculum acetoxidans DSM 771 (DTOX_0604), Pedobacter heparinus DSM 2366 (PHEP_3664), Chitinophaga pinensis DSM 2588 (CPIN_5466), Flavobacteria bacterium MS024-2A (FLAV2ADRAFT_0090), Flavobacteria bacterium MS024-3C (FLAV3CDRAFT_0851), Moorea producta 3L (LYNGBM3L_14400), Anoxybacillus flavithermus WK1 (AFLV_0149), Mycoplasma fermentans PG18 (MBIO_0474), Chthoniobacter flavus Ellin428 (CFE428DRAFT_3031), Cyanothece sp. PCC 7822 (CYAN7822_1152), Borrelia spielmanii A14S (BSPA14S_0009), Heliobacterium modesticaldum Ice1 (HM1_1522), Thermus aquaticus Y51MC23 (TAQDRAFT_3938), Clostridium sticklandii DSM 519 (CLOST_0484), Tepidanaerobacter sp. Re1 (TEPRE1_0323), Clostridium hiranonis DSM 13275 (CLOHIR_00003), Mitsuokella multacida DSM 20544 (MITSMUL_03479), Haliangium ochraceum DSM 14365 (HOCH_3550), Spirosoma linguale DSM 74 (SLIN_2673), unidentified eubacterium SCB49 (SCB49_03679), Acetivibrio cellulolyticus CD2 (ACELC_020100013845), Lactobacillus buchneri NRRL B-30929 (LBUC_1299), Butyrivibrio crossotus DSM 2876 (BUTYVIB_02056), Candidatus Azobacteroides pseudotrichonymphae genomovar. CFP2 (CFPG_066), Mycoplasma crocodyli MP145 (MCRO_0385), Arthrospira maxima CS-328 (AMAXDRAFT_4184), Eubacterium eligens ATCC 27750 (EUBELI_01626), Butyrivibrio proteoclasticus B316 (BPR_I2587), Chloroherpeton thalassium ATCC 35110 (CTHA_1340), Eubacterium biforme DSM 3989 (EUBIFOR_01794), Rhodothermus marinus DSM 4252 (RMAR_0146), Borrelia bissettii DN127 (BBIDN127_0008), Capnocytophaga ochracea DSM 7271 (COCH_2107), Alicyclobacillus acidocaldarius subsp. acidocaldarius DSM 446 (AACI_2672), Caldicellulosiruptor bescii DSM 6725 (ATHE_0361), Denitrovibrio acetiphilus DSM 12809 (DACET_1298), Desulfovibrio desulfuricans subsp. desulfuricans str. ATCC 27774 (DDES_1715), Anaerococcus lactolyticus ATCC 51172 (HMPREF0072_1645), Anaerococcus tetradius ATCC 35098 (HMPREF0077_0902), Finegoldia magna ATCC 53516 (HMPREF0391_10377), Lactobacillus antri DSM 16041 (YBBP), Lactobacillus buchneri ATCC 11577 (HMPREF0497_2752), Lactobacillus ultunensis DSM 16047 (HMPREF0548_0745), Lactobacillus vaginalis ATCC 49540 (HMPREF0549_0766), Listeria grayi DSM 20601 (HMPREF0556_11652), Sphingobacterium spiritivorum ATCC 33861 (HMPREF0766_11787), Staphylococcus epidermidis M23864:W1 (HMPREF0793_0092), Streptococcus equinus ATCC 9812 (HMPREF0819_0812), Desulfomicrobium baculatum DSM 4028 (DBAC_0255), Thermanaerovibrio acidaminovorans DSM 6589 (TACI_0837), Thermobaculum terrenum ATCC BAA-798 (TTER_1817), Anaerococcus prevotii DSM 20548 (APRE_0370), Desulfovibrio salexigens DSM 2638 (DESAL_1795), Brachyspira murdochii DSM 12563 (BMUR_2186), Meiothermus silvanus DSM 9946 (MESIL_0161), Bacillus cereus Rock4-18 (BCERE0024_1410), Cylindrospermopsis raciborskii CS-505 (CRC_01921), Raphidiopsis brookii D9 (CRD_01188), Clostridium carboxidivorans P7 2 seqs CLCAR_0016, CCARBDRAFT_4266), Clostridium botulinum E1 str. BoNT E Beluga (CLO_3490), Blautia hansenii DSM 20583 (BLAHAN_07155), Prevotella copri DSM 18205 (PREVCOP_04867), Clostridium methylpentosum DSM 5476 (CLOSTMETH_00084), Lactobacillus casei BL23 (LCABL_11800), Bacillus megaterium QM B1551 (BMQ_0195), Treponema primitia ZAS-2 (TREPR_1936), Treponema azotonutricium ZAS-9 (TREAZ_0147), Holdemania filiformis DSM 12042 (HOLDEFILI_03810), Filifactor alocis ATCC 35896 (HMPREF0389_00366), Gemella haemolysans ATCC 10379 (GEMHA0001_0912), Selenomonas sputigena ATCC 35185 (SELSP_1610), Veillonella dispar ATCC 17748 (VEIDISOL_01845), Deinococcus deserti VCD115 (DEIDE_19700), Bacteroides coprophilus DSM 18228 (BACCOPRO_00159), Nostoc azollae 0708 (AAZO_4735), Erysipelotrichaceae bacterium 5_2_54 FAA (HMPREF0863_02273), Ruminococcaceae bacterium D16 (HMPREF0866_01061), Prevotella bivia JCVIHMP010 (HMPREF0648_0338), Prevotella melaninogenica ATCC 25845 (HMPREF0659_A6212), Porphyromonas endodontalis ATCC 35406 (POREN0001_0251), Capnocytophaga sputigena ATCC 33612 (CAPSP0001_0727), Capnocytophaga gingivalis ATCC 33624 (CAPGI0001_1936), Clostridium hylemonae DSM 15053 (CLOHYLEM_04631), Thermosediminibacter oceani DSM 16646 (TOCE_1970), Dethiobacter alkaliphilus AHT 1 (DEALDRAFT_0231), Desulfonatronospira thiodismutans ASO3-1 (DTHIO_PD2806), Clostridium sp. D5 (HMPREF0240_03780), Anaerococcus hydrogenalis DSM 7454 (ANHYDRO_01144), Kyrpidia tusciae DSM 2912 (BTUS_0196), Gemella haemolysans M341 (HMPREF0428_01429), Gemella morbillorum M424 (HMPREF0432_01346), Gemella sanguinis M325 (HMPREF0433_01225), Prevotella oris C735 (HMPREF0665_01741), Streptococcus sp. M143 (HMPREF0850_00109), Streptococcus sp. M334 (HMPREF0851_01652), Bilophila wadsworthia 3_1_6 (HMPREF0179_00899), Brachyspira hyodysenteriae WA1 (BHWA1_01167), Enterococcus gallinarum EG2 (EGBG_00820), Enterococcus casseliflavus EC20 (ECBG_00827), Enterococcus faecium C68 (EFXG_01665), Syntrophus aciditrophicus SB (SYN_02762), Lactobacillus rhamnosus GG 2 seqs OSSG, LRHM_0937), Acidaminococcus intestini RyC-MR95 (ACIN_2069), Mycoplasma conjunctivae HRC/581 (MCJ_002940), Halanaerobium praevalens DSM 2228 (HPRAE_1647), Aminobacterium colombiense DSM 12261 (AMICO_0737), Clostridium cellulovorans 743B (CLOCEL_3678), Desulfovibrio magneticus RS-1 (DMR_25720), Spirochaeta smaragdinae DSM 11293 (SPIRS_1647), Bacteroidetes oral taxon 274 str. F0058 (HMPREF0156_01826), Lachnospiraceae oral taxon 107 str. F0167 (HMPREF0491_01238), Lactobacillus coleohominis 101-4-CHN (HMPREF0501_01094), Lactobacillus jensenii 27-2-CHN (HMPREF0525_00616), Prevotella buccae D17 (HMPREF0649_02043), Prevotella sp. oral taxon 299 str. F0039 (HMPREF0669_01041), Prevotella sp. oral taxon 317 str. F0108 (HMPREF0670_02550), Desulfobulbus propionicus DSM 2032 2 seqs DESPR_2503, DESPR_1053), Thermoanaerobacterium thermosaccharolyticum DSM 571 (TTHE_0484), Thermoanaerobacter italicus Ab9 (THIT_1921), Thermovirga lienii DSM 17291 (TLIE_0759), Aminomonas paucivorans DSM 12260 (APAU_1274), Streptococcus mitis SK321 (SMSK321_0127), Streptococcus mitis SK597 (SMSK597_0417), Roseburia hominis A2-183 (RHOM_12405), Oribacterium sinus F0268 (HMPREF6123_0887), Prevotella bergensis DSM 17361 (HMPREF0645_2701), Selenomonas noxia ATCC 43541 (YBBP), Weissella paramesenteroides ATCC 33313 (HMPREF0877_0011), Lactobacillus amylolyticus DSM 11664 (HMPREF0493_1017), Bacteroides sp. D20 (HMPREF0969_02087), Clostridium papyrosolvens DSM 2782 (CPAP_3968), Desulfurivibrio alkaliphilus AHT2 (DAAHT2_0445), Acidaminococcus fermentans DSM 20731 (ACFER_0601), Abiotrophia defectiva ATCC 49176 (GCWU000182_00063), Anaerobaculum hydrogeniformans ATCC BAA-1850 (HMPREF1705_01115), Catonella morbi ATCC 51271 (GCWU000282_00629), Clostridium botulinum D str. 1873 (CLG_B1859), Dialister invisus DSM 15470 (GCWU000321_01906), Fibrobacter succinogenes subsp. succinogenes S85 2 seqs FSU_0028, FISUC_2776), Desulfovibrio fructosovorans JJ (DESFRDRAFT_2879), Peptostreptococcus stomatis DSM 17678 (HMPREF0634_0727), Staphylococcus warneri L37603 (STAWA0001_0094), Treponema vincentii ATCC 35580 (TREVI0001_1289), Porphyromonas uenonis 60-3 (PORUE0001_0199), Peptostreptococcus anaerobius 653-L (HMPREF0631_1228), Peptoniphilus lacrimalis 315-B (HMPREF0628_0762), Candidatus Phytoplasma australiense (PA0090), Prochlorococcus marinus subsp. pastoris str. CCMP1986 (PMM1091), Synechococcus sp. WH 7805 (WH7805_04441), Blattabacterium sp. (Periplaneta americana) str. BPLAN (BPLAN_534), Caldicellulosiruptor obsidiansis OB47 (COB47_0325), Oribacterium sp. oral taxon 078 str. F0262 (GCWU000341_01365), Hydrogenobacter thermophilus TK-6 2 seqs AD046034.1, HTH_1665), Clostridium saccharolyticum WM1 (CLOSA_1248), Prevotella sp. oral taxon 472 str. F0295 (HMPREF6745_1617), Paenibacillus sp. oral taxon 786 str. D14 (POTG_03822), Roseburia inulinivorans DSM 16841 2 seqs ROSEINA2194_02614, ROSEINA2194_02613), Granulicatella elegans ATCC 700633 (HMPREF0446_01381), Prevotella tannerae ATCC 51259 (GCWU000325_02844), Shuttleworthia satelles DSM 14600 (GCWU000342_01722), Phascolarctobacterium succinatutens YIT 12067 (HMPREF9443_01522), Clostridium butyricum E4 str. BoNT E BL5262 (CLP_3980), Caldicellulosiruptor hydrothermalis 108 (CALHY_2287), Caldicellulosiruptor kristjanssonii 177R1B (CALKR_0314), Caldicellulosiruptor owensensis OL (CALOW_0228), Eubacterium cellulosolvens 6 (EUBCEDRAFT_1150), Geobacillus thermoglucosidasius C56-Y593 (GEOTH_0175), Thermincola potens JR (THERJR_0376), Nostoc punctiforme PCC 73102 (NPUN_F5990), Granulicatella adiacens ATCC 49175 (YBBP), Selenomonas flueggei ATCC 43531 (HMPREF0908_1366), Thermocrinis albus DSM 14484 (THAL_0234), Deferribacter desulfuricans SSM1 (DEFDS_1031), Ruminococcus flavefaciens FD-1 (RFLAF_010100012444), Desulfovibrio desulfuricans ND132 (DND132_0877), Clostridium lentocellum DSM 5427 (CLOLE_3370), Desulfovibrio aespoeensis Aspo-2 (DAES_1257), Syntrophothermus lipocalidus DSM 12680 (SLIP_2139), Marivirga tractuosa DSM 4126 (FTRAC_3720), Desulfarculus baarsii DSM 2075 (DEBA_0764), Synechococcus sp. CC9311 (SYNC_1030), Thermaerobacter marianensis DSM 12885 (TMAR_0236), Desulfovibrio sp. FW1012B (DFW101_0480), Jonquetella anthropi E3_33 E1 (GCWU000246_01523), Syntrophobotulus glycolicus DSM 8271 (SGLY_0483), Thermovibrio ammonificans HB-1 (THEAM_0892), Truepera radiovictrix DSM 17093 (TRAD_1704), Bacillus cellulosilyticus DSM 2522 (BCELL_0170), Prevotella veroralis F0319 (HMPREF0973_02947), Erysipelothrix rhusiopathiae str. Fujisawa (ERH_0115), Desulfurispirillum indicum S5 (SELIN_2326), Cyanothece sp. PCC 7424 (PCC7424_0843), Anaerococcus vaginalis ATCC 51170 (YBBP), Aerococcus viridans ATCC 11563 (YBBP), Streptococcus oralis ATCC 35037 2 seqs HMPREF8579_1682, SMSK23_1115), Zunongwangia profunda SM-A87 (ZPR_0978), Halanaerobium hydrogeniformans (HALSA_1882), Bacteroides xylanisolvens XB1A (BXY_29650), Ruminococcus torques L2-14 (RTO_16490), Ruminococcus obeum A2-162 (CK5_33600), Eubacterium rectale DSM 17629 (EUR_24910), Faecalibacterium prausnitzli SL3/3 (FPR_27630), Ruminococcus sp. SR1/5 (CK1_39330), Lachnospiraceae bacterium 3_1_57 FAA_CT1 (HMPREF0994_01490), Lachnospiraceae bacterium 9_1_43 BFAA (HMPREF0987_01591), Lachnospiraceae bacterium 1_4_56 FAA (HMPREF0988_01806), Erysipelotrichaceae bacterium 3_1_53 (HMPREF0983_01328), Ethanoligenens harbinense YUAN-3 (ETHHA_1605), Streptococcus dysgalactiae subsp. dysgalactiae ATCC 27957 (SDD27957_06215), Spirochaeta thermophila DSM 6192 (STHERM_C18370), Bacillus sp. 2_A_57_CT2 (HMPREF1013_05449), Bacillus clausii KSM-K16 (ABCO241), Thermodesulfatator indicus DSM 15286 (THEIN_0076), Bacteroides salanitronis DSM 18170 (BACSA_1486), Oceanithermus profundus DSM 14977 (OCEPR_2178), Prevotella timonensis CRIS 5C-B1 (HMPREF9019_2028), Prevotella buccalis ATCC 35310 (HMPREF0650_0675), Prevotella amnii CRIS 21A-A (HMPREF9018_0365), Bulleidia extructa W1219 (HMPREF9013_0078), Bacteroides coprosuis DSM 18011 (BCOP_0558), Prevotella multisaccharivorax DSM 17128 (PREMU_0839), Cellulophaga algicola DSM 14237 (CELAL_0483), Synechococcus sp. WH 5701 (WH5701_10360), Desulfovibrio africanus str. Walvis Bay (DESAF_3283), Oscillibacter valericigenes Sjm18-20 (OBV_23340), Deinococcus proteolyticus MRP (DEIPR_0134), Bacteroides helcogenes P 36-108 (BACHE_0366), Paludibacter propionicigenes WB4 (PALPR_1923), Desulfotomaculum nigrificans DSM 574 (DESNIDRAFT_2093), Arthrospira platensis NIES-39 (BAI89442.1), Mahella australiensis 50-1 BON (MAHAU_1846), Thermoanaerobacter wiegelii Rt8.B1 (THEWI_2191), Ruminococcus albus 7 (RUMAL_2345), Staphylococcus lugdunensis HKU09-01 (SLGD_00862), Megasphaera genomosp. type_1 str. 28L (HMPREF0889_1099), Clostridiales genomosp. BVAB3 str. UPII9-5 (HMPREF0868_1453), Pediococcus claussenii ATCC BAA-344 (PECL_571), Prevotella oulorum F0390 (HMPREF9431_01673), Turicibacter sanguinis PC909 (CUW_0305), Listeria seeligeri FSL N1-067 (NT03LS_2473), Solobacterium moorei F0204 (HMPREF9430_01245), Megasphaera micronuciformis F0359 (HMPREF9429_00929), Capnocytophaga sp. oral taxon 329 str. F0087 2 seqs HMPREF9074_00867, HMPREF9074_01078), Streptococcus anginosus F0211 (HMPREF0813_00157), Mycoplasma suis KI3806 (MSUI04040), Mycoplasma gallisepticum str. F (MGF_2771), Deinococcus maricopensis DSM 21211 (DEIMA_0651), Odoribacter splanchnicus DSM 20712 (ODOSP_0239), Lactobacillus fermentum CECT 5716 (LC40_0265), Lactobacillus iners AB-1 (LINEA_010100006089), cyanobacterium UCYN-A (UCYN_03150), Lactobacillus sanfranciscensis TMW 1.1304 (YBBP), Mucilaginibacter paludis DSM 18603 (MUCPA_1296), Lysinibacillus fusiformis ZC1 (BFZC1_03142), Paenibacillus vortex V453 (PVOR_30878), Waddlia chondrophila WSU 86-1044 (YBBP), Flexistipes sinusarabici DSM 4947 (FLEXSI_0971), Paenibacillus curdlanolyticus YK9 (PAECUDRAFT_1888), Clostridium cf. saccharolyticum K10 (CLS_03290), Alistipes shahii WAL 8301 (AL1_02190), Eubacterium cylindroides T2-87 (EC1_00230), Coprococcus catus GD/7 (CC1_32460), Faecalibacterium prausnitzii L2-6 (FP2_09960), Clostridium clariflavum DSM 19732 (CLOCL_2983), Bacillus atrophaeus 1942 (BATR1942_19530), Mycoplasma pneumoniae FH (MPNE_0277), Lachnospiraceae bacterium 2_1_46 FAA (HMPREF9477_00058), Clostridium symbiosum WAL-14163 (HMPREF9474_01267), Dysgonomonas gadei ATCC BAA-286 (HMPREF9455_02764), Dysgonomonas mossii DSM 22836 (HMPREF9456_00401), Thermus scotoductus SA-01 (TSC_C24350), Sphingobacterium sp. 21 (SPH21_1233), Spirochaeta caldaria DSM 7334 (SPICA_1201), Prochlorococcus marinus str. MIT 9312 (PMT9312_1102), Prochlorococcus marinus str. MIT 9313 (PMT_1058), Faecalibacterium cf. prausnitzii KLE1255 (HMPREF9436_00949), Lactobacillus crispatus ST1 (LCRIS_00721), Clostridium ljungdahlii DSM 13528 (CLJU_C40470), Prevotella bryantii B14 (PBR_2345), Treponema phagedenis F0421 (HMPREF9554_02012), Clostridium sp. BNL1100 (CLO1100_2851), Microcoleus vaginatus FGP-2 (MICVADRAFT_1377), Brachyspira pilosicoli 95/1000 (BP951000_0671), Spirochaeta coccoides DSM 17374 (SPICO_1456), Haliscomenobacter hydrossis DSM 1100 (HALHY_5703), Desulfotomaculum kuznetsovii DSM 6115 (DESKU_2883), Runella slithyformis DSM 19594 (RUNSL_2859), Leuconostoc kimchii IMSNU 11154 (LKI_08080), Leuconostoc gasicomitatum LMG 18811 (OSSG), Pedobacter saltans DSM 12145 (PEDSA_3681), Paraprevotella xylaniphila YIT 11841 (HMPREF9442_00863), Bacteroides clarus YIT 12056 (HMPREF9445_01691), Bacteroides fluxus YIT 12057 (HMPREF9446_03303), Streptococcus urinalis 2285-97 (STRUR_1376), Streptococcus macacae NCTC 11558 (STRMA_0866), Streptococcus ictaluri 707-05 (STRIC_0998), Oscillochloris trichoides DG-6 (OSCT_2821), Parachlamydia acanthamoebae UV-7 (YBBP), Prevotella denticola F0289 (HMPREF9137_0316), Parvimonas sp. oral taxon 110 str. F0139 (HMPREF9126_0534), Calditerrivibrio nitroreducens DSM 19672 (CALNI_1443), Desulfosporosinus orientis DSM 765 (DESOR_0366), Streptococcus mitis by. 2 str. F0392 (HMPREF9178_0602), Thermodesulfobacterium sp. OPB45 (TOPB45_1366), Synechococcus sp. WH 8102 (SYNW0935), Thermoanaerobacterium xylanolyticum LX-11 (THEXY_0384), Mycoplasma haemofelis Ohio2 (MHF_1192), Capnocytophaga canimorsus Cc5 (CCAN_16670), Pediococcus acidilactici DSM 20284 (HMPREF0623_1647), Prevotella marshii DSM 16973 (HMPREF0658_1600), Peptoniphilus duerdenii ATCC BAA-1640 (HMPREF9225_1495), Bacteriovorax marinus SJ (BMS_2126), Selenomonas sp. oral taxon 149 str. 67H29BP (HMPREF9166_2117), Eubacterium yurii subsp. margaretiae ATCC 43715 (HMPREF0379_1170), Streptococcus mitis ATCC 6249 (HMPREF8571_1414), Streptococcus sp. oral taxon 071 str. 73H25AP (HMPREF9189_0416), Prevotella disiens FB035-09AN (HMPREF9296_1148), Aerococcus urinae ACS-120-V-Col10a (HMPREF9243_0061), Veillonella atypica ACS-049-V-Sch6 (HMPREF9321_0282), Cellulophaga lytica DSM 7489 (CELLY_2319), Thermaerobacter subterraneus DSM 13965 (THESUDRAFT_0411), Desulfurobacterium thermolithotrophum DSM 11699 (DESTER_0391), Treponema succinifaciens DSM 2489 (TRESU_1152), Marinithermus hydrothermalis DSM 14884 (MARKY_1861), Streptococcus infantis SK1302 (SIN_0824), Streptococcus parauberis NCFD 2020 (SPB_0808), Streptococcus porcinus str. Jelinkova 176 (STRPO_0164), Streptococcus criceti HS-6 (STRCR_1133), Capnocytophaga ochracea F0287 (HMPREF1977_0786), Prevotella oralis ATCC 33269 (HMPREF0663_10671), Porphyromonas asaccharolytica DSM 20707 (PORAS_0634), Anaerococcus prevotii ACS-065-V-Col13 (HMPREF9290_0962), Peptoniphilus sp. oral taxon 375 str. F0436 (HMPREF9130_1619), Veillonella sp. oral taxon 158 str. F0412 (HMPREF9199_0189), Selenomonas sp. oral taxon 137 str. F0430 (HMPREF9162_2458), Cyclobacterium marinum DSM 745 (CYCMA_2525), Desulfobacca acetoxidans DSM 11109 (DESAC_1475), Listeria ivanovii subsp. ivanovii PAM 55 (LIV_2111), Desulfovibrio vulgaris str. Hildenborough (DVU_1280), Desulfovibrio vulgaris str. ‘Miyazaki F’ (DVMF_0057), Muricauda ruestringensis DSM 13258 (MURRU_0474), Leuconostoc argentinum KCTC 3773 (LARGK3_010100008306), Paenibacillus polymyxa SC2 (PPSC2_C4728), Eubacterium saburreum DSM 3986 (HMPREF0381_2518), Pseudoramibacter alactolyticus ATCC 23263 (HMP0721_0313), Streptococcus parasanguinis ATCC 903 (HMPREF8577_0233), Streptococcus sanguinis ATCC 49296 (HMPREF8578_1820), Capnocytophaga sp. oral taxon 338 str. F0234 (HMPREF9071_1325), Centipeda periodontii DSM 2778 (HMPREF9081_2332), Prevotella multiformis DSM 16608 (HMPREF9141_0346), Streptococcus peroris ATCC 700780 (HMPREF9180_0434), Prevotella salivae DSM 15606 (HMPREF9420_1402), Streptococcus australis ATCC 700641 2 seqs HMPREF9961_0906, HMPREF9421_1720), Streptococcus cristatus ATCC 51100 2 seqs HMPREF9422_0776, HMPREF9960_0531), Lactobacillus acidophilus 30SC (LAC30SC_03585), Eubacterium limosum KIST612 (ELI_0726), Streptococcus downei F0415 (HMPREF9176_1204), Streptococcus sp. oral taxon 056 str. F0418 (HMPREF9182_0330), Oribacterium sp. oral taxon 108 str. F0425 (HMPREF9124_1289), Streptococcus vestibularis F0396 (HMPREF9192_1521), Treponema brennaborense DSM 12168 (TREBR_1165), Leuconostoc fallax KCTC 3537 (LFALK3_010100008689), Eremococcus coleocola ACS-139-V-Col8 (HMPREF9257_0233), Peptoniphilus harei ACS-146-V-Sch2b (HMPREF9286_0042), Clostridium sp. HGF2 (HMPREF9406_3692), Alistipes sp. HGBS (HMPREF9720_2785), Prevotella dentalis DSM 3688 (PREDE_0132), Streptococcus pseudoporcinus SPIN 20026 (HMPREF9320_0643), Dialister microaerophilus UPII 345-E (HMPREF9220_0018), Weissella cibaria KACC 11862 (WCIBK1_010100001174), Lactobacillus coryniformis subsp. coryniformis KCTC 3167 (LCORCK3_010100001982), Synechococcus sp. PCC 7335 (S7335_3864), Owenweeksia hongkongensis DSM 17368 (OWEHO_3344), Anaerolinea thermophila UNI-1 (ANT_09470), Streptococcus oralis Uo5 (SOR_0619), Leuconostoc gelidum KCTC 3527 (LGELK3_010100006746), Clostridium botulinum BKT015925 (CBC4_0275), Prochlorococcus marinus str. MIT 9211 (P9211_10951), Prochlorococcus marinus str. MIT 9215 (P9215_12271), Staphylococcus aureus subsp. aureus NCTC 8325 (SAOUHSC_02407), Staphylococcus aureus subsp. aureus COL (SACOL2153), Lactobacillus animalis KCTC 3501 (LANIK3_010100000290), Fructobacillus fructosus KCTC 3544 (FFRUK3_010100006750), Acetobacterium woodii DSM 1030 (AWO_C28200), Planococcus donghaensis MPA1U2 (GPDM_12177), Lactobacillus farciminis KCTC 3681 (LFARK3_010100009915), Melissococcus plutonius ATCC 35311 (MPTP_0835), Lactobacillus fructivorans KCTC 3543 (LFRUK3_010100002657), Paenibacillus sp. HGF7 (HMPREF9413_5563), Lactobacillus oris F0423 (HMPREF9102_1081), Veillonella sp. oral taxon 780 str. F0422 (HMPREF9200_1112), Parvimonas sp. oral taxon 393 str. F0440 (HMPREF9127_1171), Tetragenococcus halophilus NBRC 12172 (TEH_13100), Candidatus Chloracidobacterium thermophilum B (CABTHER_A1277), Ornithinibacillus scapharcae TW25 (OTW25_010100020393), Lacinutrix sp. 5H-3-7-4 (LACAL_0337), Krokinobacter sp. 4H-3-7-5 (KRODI_0177), Staphylococcus pseudintermedius ED99 (SPSE_0659), Staphylococcus aureus subsp. aureus MSHR1132 (CCE59824.1), Paenibacillus terrae HPL-003 (HPL003_03660), Caldalkalibacillus thermarum TA2.A1 (CATHTA2_0882), Desmospora sp. 8437 (HMPREF9374_2897), Prevotella nigrescens ATCC 33563 (HMPREF9419_1415), Prevotella pallens ATCC 700821 (HMPREF9144_0175), Streptococcus infantis X (HMPREF1124.

[0424] In some embodiments, the genetically engineered bacteria are capable of increasing c-di-AMP levels in the tumor microenvironment. In some embodiments, the genetically engineered bacteria are capable of increasing c-diAMP levels in the intracellular space in a tumor. In some embodiments, the genetically engineered bacteria are capable of increasing c-diAMP levels inside of a eukaryotic cell. In some embodiments, the genetically engineered bacteria are capable of increasing c-diAMP levels inside of an immune cell. In some embodiments, the cell is a phagocyte. In some embodiments, the cell is a macrophage. In some embodiments, the cell is a dendritic cell. In some embodiments, the cell is a neutrophil. In some embodiments, the cell is a MDSC. In some embodiments, the genetically engineered bacteria are capable of increasing c-GAMP (2′3′ or 3′3′) and/or cyclic-di-GMP levels inside of a cancer cell. In some embodiments, the genetically engineered bacteria are capable of increasing c-di-AMP levels in vitro in the bacterial cell and/or in the growth medium.

[0425] In any of these embodiments, the bacteria genetically engineered to produce cyclic-di-AMP produce at least about 0% to 2% to 4%, 4% to 6%,6% to 8%, 8% to 10%, 10% to 12%, 12% to 14%, 14% to 16%, 16% to 18%, 18% to 20%, 20% to 25%,25% to 30%, 30% to 35%, 35% to 40%,40% to 45% 45% to 50%, 50% to 55%, 55% to 60%, 60% to 65%, 65% to 70% to 80%, 80% to 90%, or 90% to 100% more cyclic-di-AMP than unmodified bacteria of the same bacterial subtype under the same conditions. In yet another embodiment, the genetically engineered bacteria produce at least about 0 to 1.0-fold, 1.0-1.2-fold, 1.2-1.4-fold, 1.4-1.6-fold, 1.6-1.8-fold, 1.8-2-fold, or two-fold more cyclic-di-AMP than unmodified bacteria of the same bacterial subtype under the same conditions. In yet another embodiment, the genetically engineered bacteria produce at least about 2 to 3-fold, 3 to 4-fold, 4 to 5-fold, 5 to 6-fold, 6 to 7-fold, 7 to 8-fold, 8 to 9-fold, 9 to 10-fold, 10 to 15-fold, 15 to 20-fold, 20 to 30-fold, 30 to 40-fold, or 40 to 50-fold, 50 to 100-fold, 100 to 500-fold, or 500 to 1000-fold or more cyclic-di-AMP than unmodified bacteria of the same bacterial subtype under the same conditions.

[0426] In any of these embodiments, the bacteria genetically engineered to produce cyclic-di-AMP consume at least about 0% to 2% to 4%, 4% to 6%,6% to 8%, 8% to 10%, 10% to 12%, 12% to 14%, 14% to 16%, 16% to 18%, 18% to 20%, 20% to 25%,25% to 30%, 30% to 35%, 35% to 40%,40% to 45% 45% to 50%, 50% to 55%, 55% to 60%, 60% to 65%, 65% to 70% to 80%, 80% to 90%, or 90% to 100% more ATP than unmodified bacteria of the same bacterial subtype under the same conditions. In yet another embodiment, the genetically engineered bacteria consume at least about 0 to 1.0-fold, 1.0-1.2-fold, 1.2-1.4-fold, 1.4-1.6-fold, 1.6-1.8-fold, 1.8-2-fold, or two-fold more ATP than unmodified bacteria of the same bacterial subtype under the same conditions. In yet another embodiment, the genetically engineered bacteria produce at least about 2 to 3-fold, 3 to 4-fold, 4 to 5-fold, 5 to 6-fold, 6 to 7-fold, 7 to 8-fold, 8 to 9-fold, 9 to 10-fold, 10 to 15-fold, 15 to 20-fold, 20 to 30-fold, 30 to 40-fold, or 40 to 50-fold, 50 to 100-fold, 100 to 500-fold, or 500 to 1000-fold or more cyclic-di-AMP than unmodified bacteria of the same bacterial subtype under the same conditions.

[0427] In any of these embodiments, the bacteria genetically engineered to produce cyclic-di-GAMP produce at least about 0% to 2% to 4%, 4% to 6%,6% to 8%, 8% to 10%, 10% to 12%, 12% to 14%, 14% to 16%, 16% to 18%, 18% to 20%, 20% to 25%,25% to 30%, 30% to 35%, 35% to 40%,40% to 45% 45% to 50%, 50% to 55%, 55% to 60%, 60% to 65%, 65% to 70% to 80%, 80% to 90%, or 90% to 100% more arginine than unmodified bacteria of the same bacterial subtype under the same conditions. In yet another embodiment, the genetically engineered bacteria produce at least about 0 to 1.0-fold, 1.0-1.2-fold, 1.2-1.4-fold, 1.4-1.6-fold, 1.6-1.8-fold, 1.8-2-fold, or two-fold more cyclic-di-GAMP than unmodified bacteria of the same bacterial subtype under the same conditions. In yet another embodiment, the genetically engineered bacteria produce at least about 2 to 3-fold, 3 to 4-fold, 4 to 5-fold, 5 to 6-fold, 6 to 7-fold, 7 to 8-fold, 8 to 9-fold, 9 to 10-fold, 10 to 15-fold, 15 to 20-fold, 20 to 30-fold, 30 to 40-fold, or 40 to 50-fold, 50 to 100-fold, 100 to 500-fold, or 500 to 1000-fold or more cyclic-di-GAMP than unmodified bacteria of the same bacterial subtype under the same conditions.

[0428] In any of these embodiments, the bacteria genetically engineered to produce cyclic-di-GAMP consume at least about 0% to 2% to 4%, 4% to 6%,6% to 8%, 8% to 10%, 10% to 12%, 12% to 14%, 14% to 16%, 16% to 18%, 18% to 20%, 20% to 25%,25% to 30%, 30% to 35%, 35% to 40%,40% to 45% 45% to 50%, 50% to 55%, 55% to 60%, 60% to 65%, 65% to 70% to 80%, 80% to 90%, or 90% to 100% more ATP than unmodified bacteria of the same bacterial subtype under the same conditions. In yet another embodiment, the genetically engineered bacteria consume at least about 0 to 1.0-fold, 1.0-1.2-fold, 1.2-1.4-fold, 1.4-1.6-fold, 1.6-1.8-fold, 1.8-2-fold, or two-fold more ATP and/or GTP than unmodified bacteria of the same bacterial subtype under the same conditions. In yet another embodiment, the genetically engineered bacteria consume at least about 2 to 3-fold, 3 to 4-fold, 4 to 5-fold, 5 to 6-fold, 6 to 7-fold, 7 to 8-fold, 8 to 9-fold, 9 to 10-fold, 10 to 15-fold, 15 to 20-fold, 20 to 30-fold, 30 to 40-fold, or 40 to 50-fold, 50 to 100-fold, 100 to 500-fold, or 500 to 1000-fold or more ATP and/or GTP than unmodified bacteria of the same bacterial subtype under the same conditions.

[0429] In any of these embodiments, the genetically engineered bacteria increase STING agonist production rate by at least about 0% to 2% to 4%, 4% to 6%,6% to 8%, 8% to 10%, 10% to 12%, 12% to 14%, 14% to 16%, 16% to 18%, 18% to 20%, 20% to 25%,25% to 30%, 30% to 35%, 35% to 40%,40% to 45% 45% to 50%, 50% to 55%, 55% to 60%, 60% to 65%, 65% to 70% to 80%, 80% to 90%, or 90% to 100% relative to unmodified bacteria of the same bacterial subtype under the same conditions. In yet another embodiment, the genetically engineered bacteria increase the STING agonist production rate by at least about 0 to 1.0-fold, 1.0-1.2-fold, 1.2-1.4-fold, 1.4-1.6-fold, 1.6-1.8-fold, 1.8-2-fold, or two-fold more relative to unmodified bacteria of the same bacterial subtype under the same conditions. In yet another embodiment, the genetically engineered bacteria increase STING agonist production rate by about three-fold, four-fold, five-fold, six-fold, seven-fold, eight-fold, nine-fold, ten-fold, fifteen-fold, twenty-fold, thirty-fold, forty-fold, or fifty-fold, hundred-fold, five hundred-fold, or one-thousand-fold relative to unmodified bacteria of the same bacterial subtype under the same conditions.

[0430] In one embodiment, the genetically engineered bacteria increase STING agonist production by at least about 80% to 100% relative to unmodified bacteria of the same bacterial subtype under the same conditions, after 4 hours. In one embodiment, the genetically engineered bacteria increase STING agonist production by at least about 90% to 100% relative to unmodified bacteria of the same bacterial subtype under the same conditions after 4 hours. In one specific embodiment, the genetically engineered bacteria increase STING agonist production by at least about 95% to 100% relative to unmodified bacteria of the same bacterial subtype under the same conditions, after 4 hours. In one specific embodiment, the genetically engineered bacteria increase the STING agonist production by at least about 99% to 100% relative to unmodified bacteria of the same bacterial subtype under the same conditions, after 4 hours. In yet another embodiment, the genetically engineered bacteria increase the STING agonist production by at least about 10-50 fold after 4 hours. In yet another embodiment, the genetically engineered bacteria increase STING agonist production by at least about 50-100 fold after 4 hours. In yet another embodiment, the genetically engineered bacteria increase STING agonist production by at least about 100-500 fold after 4 hours. In yet another embodiment, the genetically engineered bacteria increase STING agonist production by at least about 500-1000 fold after 4 hours. In yet another embodiment, the genetically engineered bacteria increase the STING agonist production by at least about 1000-5000 fold after 4 hours. In yet another embodiment, the genetically engineered bacteria increase the STING agonist production by at least about 5000-10000 fold after 4 hours. In yet another embodiment, the genetically engineered bacteria increase STING agonist production by at least about 10000-1000 fold after 4 hours.

[0431] In any of these STING agonist production embodiments, the genetically engineered bacteria are capable of reducing tumor cell proliferation (in vitro during cell culture and/or in vivo) by at least about 0 to 10%, 10% to 20%, 20% to 25%, 25% to 30%, 30% to 40%, 40% to 50%, 50% to 60%, 60% to 70%, 70% to 75%, 75% to 80%, 80% to 85%, 85% to 90%, 90% to 95%, 95% to 99%, or more as compared to an unmodified bacteria of the same subtype under the same conditions. In any of these STING agonist production embodiments, the genetically engineered bacteria are capable of reducing tumor growth by at least about 0 to 10%, 10% to 20%, 20% to 25%, 25% to 30%, 30% to 40%, 40% to 50%, 50% to 60%, 60% to 70%, 70% to 75%, 75% to 80%, 80% to 85%, 85% to 90%, 90% to 95%, 95% to 99%10% to 20%, 20% to 25%, 25% to 30%, 30% to 40%, 40% to 50%, 50% to 60%, 60% to 70%, 70% to 75%, 75% to 80%, 80% to 85%, 85% to 90%, 90% to 95%, 95% to 99%, or more as compared to an unmodified bacteria of the same subtype under the same conditions. In any of these STING agonist production embodiments, the genetically engineered bacteria are capable of reducing tumor size by at least about 0 to 10%, 10% to 20%, 20% to 25%, 25% to 30%, 30% to 40%, 40% to 50%, 50% to 60%, 60% to 70%, 70% to 75%, 75% to 80%, 80% to 85%, 85% to 90%, 90% to 95%, 95% to 99%10% to 20%, 20% to 25%, 25% to 30%, 30% to 40%, 40% to 50%, 50% to 60%, 60% to 70%, 70% to 75%, 75% to 80%, 80% to 85%, 85% to 90%, 90% to 95%, 95% to 99%, or more as compared to an unmodified bacteria of the same subtype under the same conditions. In any of these agonist STING production embodiments, the genetically engineered bacteria are capable of reducing tumor volume by at least about 0 to 10%, 10% to 20%, 20% to 25%, 25% to 30%, 30% to 40%, 40% to 50%, 50% to 60%, 60% to 70%, 70% to 75%, 75% to 80%, 80% to 85%, 85% to 90%, 90% to 95%, 95% to 99%10% to 20%, 20% to 25%, 25% to 30%, 30% to 40%, 40% to 50%, 50% to 60%, 60% to 70%, 70% to 75%, 75% to 80%, 80% to 85%, 85% to 90%, 90% to 95%, 95% to 99%, or more as compared to an unmodified bacteria of the same subtype under the same conditions. In any of these STING agonist production embodiments, the genetically engineered bacteria are capable of reducing tumor weight by at least about 0 to 10%, 10% to 20%, 20% to 25%, 25% to 30%, 30% to 40%, 40% to 50%, 50% to 60%, 60% to 70%, 70% to 75%, 75% to 80%, 80% to 85%, 85% to 90%, 90% to 95%, 95% to 99%10% to 20%, 20% to 25%, 25% to 30%, 30% to 40%, 40% to 50%, 50% to 60%, 60% to 70%, 70% to 75%, 75% to 80%, 80% to 85%, 85% to 90%, 90% to 95%, 95% to 99%, or more as compared to an unmodified bacteria of the same subtype under the same conditions.

[0432] In some embodiments, the genetically engineered bacteria comprising gene sequences encoding dacA (and/or another enzyme for the production of a STING agonists, e.g., cGAS) are able to increase IFN-β1 mRNA or protein levels in macrophages and/or dendritic cells, e.g., in cell culture. In some embodiments, the IFN-β1 mRNA or protein increase dependent on the dose of bacteria administered. In some embodiments, the genetically engineered bacteria comprising gene sequences encoding dacA (and/or another enzyme for the production of a STING agonists, e.g., cGAS) are able to increase IFN-β1 mRNA or protein levels in macrophages and/or dendritic cells, e.g., in the tumor. In some embodiments, the IFN-beta1 mRNA or protein increase is dependent on the dosage of bacteria administered.

[0433] In one embodiment, IFN-beta1 mRNA or protein production in tumors is about two-fold, about 3-fold, about 4-fold as compared to levels of IFN-beta1 production observed upon administration of an unmodified bacteria of the same subtype under the same conditions, e.g., at day 2 after first injection of the bacteria. In some embodiments, the genetically engineered bacteria induce the production of at least about 6,000 to 25,000, 15,000 to 25,000, 6,000 to 8,000, 20,000 to 25,000 pg/ml IFN b1 mRNA in bone marrow-derived dendritic cells, e.g., at 4 hours post-stimulation.

[0434] In some embodiments, the genetically engineered bacteria comprising gene sequences encoding dacA (or another enzyme for the production of a STING agonists) can dose-dependently increase IFN-b1 production in bone marrow-derived dendritic cells, e.g., at 2 or 4 hours post stimulation.

[0435] In some embodiments, the genetically engineered bacteria comprising gene sequences encoding dacA (or another enzyme for the production of a STING agonists) are able to reduce tumor volume, e.g., at 4 or 9 days after a regimen of 3 bacterial treatments, relative to an unmodified bacteria of the same subtype under the same conditions. In a non-limiting example, the tumor volume is about 0 to 30 mm3 after 9 days.

[0436] In some embodiments, the tumor volume at day 1, 4, and 12 or three times a week for 27 days or longer. In some embodiments, complete tumor rejection is observed.

[0437] Tumor volume in models in mice can be used to characterize strain activity. For example, the tumor volume may be measured at day 1, 4, and 12 or three times a week for 27 days or longer in a tumor model such as the A20 B cell lymphoma model, or other models described herein or known in the art. Different doses may be administered to establish show a dose dependent response and to establish efficacy and tolerability. Tumor volume may be compared between an animal administered the STING agonist strain and the strain without the STING circuitry of the same subtype under the same conditions. In some embodiments, the tumor volume may be measured at day 1, 4, and 12 or three times a week for 27 days or longer. In one embodiment, tumor volume is at least about 1 to 2-fold, 2 to 3-fold, 3 to 4-fold, 4 to 5-fold, 5 to 6-fold, 6 to 7-fold or 7 to 8-fold reduced in the STING producing strain as compared to the unmodified strains of the same subtype under the same conditions, e.g., as assessed in the A20 model. In one embodiment, tumor volume can be compared in the A20 mouse model between the STING producing strain and the unmodified strain of the same subtype under the same conditions at 5, 8 or 12 days. In one embodiment, tumor volume is at least about 6-fold reduced at 12 days upon administration with the STING producing strain at 10\hat{ }8 CFU as compared to the unmodified strains of the same subtype under the same conditions after 12 days. In one embodiment, tumor volume is at least about 2-fold to 3-fold reduced at 12 days upon administration with the STING producing strain at 10\hat{ }7 CFU as compared to the unmodified strains of the same subtype under the same conditions after 12 days. In one embodiment, tumor volume is at least about 3-fold to 4-fold reduced at 12 days upon administration with the STING producing strain at 10\hat{ }7 CFU as compared to the unmodified strains of the same subtype under the same conditions after 12 days.

[0438] Strain activity of the STING agonist producing strain can be defined by conducting in vitro measurements c-di-AMP production (in the cell or in the medium). C-di-AMP production can be measured over a time period of 1, 2, 3, 4, 5, 6 hours or greater. In one example, c-di-AMP levels can be measured at 0, 2, or 4 hours. Unmodified Nissle can be used as a baseline in such measurements. If STING agonist producing enzyme is under the control of a promoter which is induced by a chemical inducer, the inducer needs to be added. If STING agonist producing enzyme is under the control of a promoter which is induced by exogenous environmental conditions, such as low-oxygen conditions, the bacterial cells are induced under these conditions, e.g., low oxygen conditions. As an additional baseline measurement, STING agonist producing strains which are inducible can be left uninduced. After the incubation time, levels of c-diAMP can be measured by LC-MS as described herein. In some embodiments, the induced STING agonist producing strain is capable of producing c-di-AMP at a concentration of at least about 0.01 mM to 1.4 mM per 10\hat{ }9. In some embodiments, the induced STING agonist producing strain is capable of producing c-di-AMP at a concentration of at least about 0.01 mM to 0.02 mM, 0.02 mM to 0.03 mM, 0.03 mM to 0.04 mM, 0.04 mM to 0.05 mM, 0.05 mM to 0.06 mM, 0.06 mM to 0.07 mM, 0.07 mM to 0.08 mM, 0.08 mM to 0.09 mM, 0.09 mM to 0.10 mM, 0.10 mM to 0.12 mM per 10\hat{ }9 e.g., after 2 or 4 hours. In some embodiments, the induced STING agonist producing strain is capable of producing c-di-AMP at a concentration of at least about 0.1 mM to 0.2 mM, 0.2 mM to 0.3 mM, 0.3 mM to 0.4 mM, 0.4 mM to 0.5 mM, 0.5 mM to 0.6 mM, 0.6 mM to 0.7 mM, 0.7 mM to 0.8 mM, 0.8 mM to 0.9 mM, 0.9 mM to 1 mM, 1 mM to 1.2 mM, 1.2 mM to 1.3 mM, 1.3 mM to 1.4 mM per 10\hat{ }9 e.g., after 2 or 4 hours.

[0439] Strain activity of the STING agonist producing strain may also be measured using in vitro measurements of activity. In a non-limiting example of an in vitro strain activity measurement, IFN-beta1 induction in RAW 264.7 cells (or other macrophage or dendritic cell) in culture may be measured. Activity of the strain can be measured at various multiplicities of infection (MOI) at various time points. For example, activity can be measured at 1, 2, 3, 4, 5, 6 hours or greater. In one example activity can be measured at 45 minutes or 4 hours. Unmodified Nissle can be used as a baseline in such measurements. If STING agonist producing enzyme is under the control of a promoter which is induced by a chemical inducer, the inducer needs to be added. If STING agonist producing enzyme is under the control of a promoter which is induced by exogenous environmental conditions, such as low-oxygen conditions, the bacterial cells are induced under these conditions, e.g., low oxygen conditions. As an additional baseline measurement, STING agonist producing strains which are inducible can be left uninduced. After the incubation time, IFN-beta levels can be measured from protein extracts or RNA levels can be analyzed, e.g., via PCT based methods. In some embodiments, the induced STING agonist producing strain can elicit a dose-dependent induction of IFN-b levels. In some embodiments, 10\hat{ }1 to 10\hat{ }2 (multiplicities of infection (MOI) can induce at least about 20 to 25 times, 25 to 30 times, 30 to 35 times, 35 to 40 times or more greater IFN-beta levels as the unmodified Nissle baseline strain of the same subtype under the same conditions, eg., after 4 hours. In some embodiments, 10\hat{ }1 to 10\hat{ }2 (multiplicities of infection (MOI) can induce at least about 10,000 to 12,000, 12,000 to 15,000, 15,000 to 20,000 or 20,000 to 25,000 pg/ml media IFN-beta e.g., after 4 hours.

[0440] In some embodiments, 10\hat{ }1 to 10\hat{ }2 (multiplicities of infection (MOI) can induce at least about 10 to 12 times, 12 to 15 times, 15 to 20 times, 20 to 25 times or more greater IFN-beta levels as the wild type Nissle baseline strain of the same subtype under the same conditions, e.g., after 45 minutes. In some embodiments, 10\hat{ }1 to 10\hat{ }2 (multiplicities of infection (MOI) can induce at least about 4,000 to 6,000, 6,000 to 8,000, 8,000 to 10,000 or 10,000 to 12,000 pg/ml media IFN-beta e.g., after 45 minutes.

[0441] In some embodiments, the bacteria genetically engineered to produce STING agonists are capable of increasing the response rate by at least about 0 to 10%, 10% to 20%, 20% to 25%, 25% to 30%, 30% to 40%, 40% to 50%, 50% to 60%, 60% to 70%, 70% to 75%, 75% to 80%, 80% to 85%, 85% to 90%, 90% to 95%, 95% to 99%10% to 20%, 20% to 25%, 25% to 30%, 30% to 40%, 40% to 50%, 50% to 60%, 60% to 70%, 70% to 75%, 75% to 80%, 80% to 85%, 85% to 90%, 90% to 95%, 95% to 99%, 98% or more as compared to an unmodified bacteria of the same subtype under the same conditions. In some embodiments, the genetically engineered bacteria comprising gene sequences encoding dacA, achieve a 100% response rate.

[0442] In some embodiments, the response rate is at least about 0 to 1.0-fold, 1.0-1.2-fold, 1.2-1.4-fold, 1.4-1.6-fold, 1.6-1.8-fold, 1.8-2-fold, or two-fold than observed with than unmodified bacteria of the same bacterial subtype under the same conditions. In yet another embodiment, the response rate is about 2 to 3-fold, 3 to 4-fold, 4 to 5-fold, 5 to 6-fold, 6 to 7-fold, 7 to 8-fold, 8 to 9-fold, 9 to 10-fold, 10 to 15-fold, 15 to 20-fold, 20 to 30-fold, 30 to 40-fold, or 40 to 50-fold, 50 to 100-fold, 100 to 500-fold, or 500 to 1000-fold or more than observed with unmodified bacteria of the same bacterial subtype under the same conditions.

[0443] In some embodiments, the genetically engineered bacteria comprising gene sequences encoding diadenylate cyclases, e.g., DacA, di-GAMP synthases, and/or other STING agonist producing polypeptides, achieve a tumor regression by at least about 0 to 10%, 10% to 20%, 20% to 25%, 25% to 30%, 30% to 40%, 40% to 50%, 50% to 60%, 60% to 70%, 70% to 75%, 75% to 80%, 80% to 85%, 85% to 90%, 90% to 95%, 95% to 99%10% to 20%, 20% to 25%, 25% to 30%, 30% to 40%, 40% to 50%, 50% to 60%, 60% to 70%, 70% to 75%, 75% to 80%, 80% to 85%, 85% to 90%, 90% to 95%, 95% to 99%, 98% or more as compared to an unmodified bacteria of the same subtype under the same conditions. In some embodiments, the tumor regression is at least about 0 to 1.0-fold, 1.0-1.2-fold, 1.2-1.4-fold, 1.4-1.6-fold, 1.6-1.8-fold, 1.8-2-fold, or two-fold than observed with than unmodified bacteria of the same bacterial subtype under the same conditions. In yet another embodiment, the tumor regression is about 2 to 3-fold, 3 to 4-fold, 4 to 5-fold, 5 to 6-fold, 6 to 7-fold, 7 to 8-fold, 8 to 9-fold, 9 to 10-fold, 10 to 15-fold, 15 to 20-fold, 20 to 30-fold, 30 to 40-fold, or 40 to 50-fold, 50 to 100-fold, 100 to 500-fold, or 500 to 1000-fold or more than observed with unmodified bacteria of the same bacterial subtype under the same conditions.

[0444] In some embodiments, the genetically engineered bacteria comprising gene sequences encoding diadenylate cyclases, e.g., DacA, di-GAMP synthases, and/or other STING agonist producing polypeptides increase total T cell numbers in the tumor draining lymph nodes. In some embodiments, the increase in total T cell numbers in the tumor draining lymph nodes is at least about 0 to 10%, 10% to 20%, 20% to 25%, 25% to 30%, 30% to 40%, 40% to 50%, 50% to 60%, 60% to 70%, 70% to 75%, 75% to 80%, 80% to 85%, 85% to 90%, 90% to 95%, 95% to 99%10% to 20%, 20% to 25%, 25% to 30%, 30% to 40%, 40% to 50%, 50% to 60%, 60% to 70%, 70% to 75%, 75% to 80%, 80% to 85%, 85% to 90%, 90% to 95%, 95% to 99%, 98% or more as compared to an unmodified bacteria of the same subtype under the same conditions. In some embodiments, the increase in total T cell numbers is at least about 0 to 1.0-fold, 1.0-1.2-fold, 1.2-1.4-fold, 1.4-1.6-fold, 1.6-1.8-fold, 1.8-2-fold, or two-fold than observed with than unmodified bacteria of the same bacterial subtype under the same conditions. In yet another embodiment, the increase in total T cell numbers is about 2 to 3-fold, 3 to 4-fold, 4 to 5-fold, 5 to 6-fold, 6 to 7-fold, 7 to 8-fold, 8 to 9-fold, 9 to 10-fold, 10 to 15-fold, 15 to 20-fold, 20 to 30-fold, 30 to 40-fold, or 40 to 50-fold, 50 to 100-fold, 100 to 500-fold, or 500 to 1000-fold more than observed with unmodified bacteria of the same bacterial subtype under the same conditions.

[0445] In some embodiments, the genetically engineered bacteria comprising gene sequences encoding diadenylate cyclases, e.g., DacA, di-GAMP synthases, and/or other STING agonist producing polypeptides increase the percentage of activated effector CD4 and CD8 T cells in tumor draining lymph nodes.

[0446] In some embodiments, the percentage of activated effector CD4 and CD8 T cells in the tumor draining lymph nodes is at least about 0 to 10%, 10% to 20%, 20% to 25%, 25% to 30%, 30% to 40%, 40% to 50%, 50% to 60%, 60% to 70%, 70% to 75%, 75% to 80%, 80% to 85%, 85% to 90%, 90% to 95%, 95% to 99%10% to 20%, 20% to 25%, 25% to 30%, 30% to 40%, 40% to 50%, 50% to 60%, 60% to 70%, 70% to 75%, 75% to 80%, 80% to 85%, 85% to 90%, 90% to 95%, 95% to 99%, 98% or more as compared to an unmodified bacteria of the same subtype under the same conditions. In some embodiments, the percentage of activated effector CD4 and CD8 T cells is at least about 0 to 1.0-fold, 1.0-1.2-fold, 1.2-1.4-fold, 1.4-1.6-fold, 1.6-1.8-fold, 1.8-2-fold, or two-fold than observed with than unmodified bacteria of the same bacterial subtype under the same conditions. In yet another embodiment, the percentage of activated effector CD4 and CD8 T cells is about 2 to 3-fold, 3 to 4-fold, 4 to 5-fold, 5 to 6-fold, 6 to 7-fold, 7 to 8-fold, 8 to 9-fold, 9 to 10-fold, 10 to 15-fold, 15 to 20-fold, 20 to 30-fold, 30 to 40-fold, or 40 to 50-fold, 50 to 100-fold, 100 to 500-fold, or 500 to 1000-fold more than observed with unmodified bacteria of the same bacterial subtype under the same conditions. In one embodiment, the gene encoded by the bacteria is DacA and the percentage of activated effector CD4 and CD8 T cells is two to four fold more than observed with unmodified bacteria of the same bacterial subtype under the same conditions.

[0447] In some embodiments, the genetically engineered bacteria comprising gene sequences encoding diadenylate cyclases, e.g., DacA, di-GAMP synthases, and/or other STING agonist producing polypeptides achieve early rise of innate cytokines inside the tumor and a later rise of an effector-T-cell response.

[0448] In some embodiments, the genetically engineered bacteria comprising gene sequences encoding dacA (or other enzymes for production of STING agonists) in the tumor microenvironment are able to overcome immunological suppression and generating robust innate and adaptive antitumor immune responses. In some embodiments, the genetically engineered bacteria comprising gene sequences encoding dacA inhibit proliferation or accumulation of regulatory T cells.

[0449] In some embodiments, the genetically engineered bacteria comprising gene sequences encoding dacA, cGAS, and/or other enzymes for production of STING agonists, achieve early rise of innate cytokines inside the tumor, including but not limited to IL-6, IL-1beta, and MCP-1.

[0450] In some embodiments IL-6 is at least about 0 to 10%, 10% to 20%, 20% to 25%, 25% to 30%, 30% to 40%, 40% to 50%, 50% to 60%, 60% to 70%, 70% to 75%, 75% to 80%, 80% to 85%, 85% to 90%, 90% to 95%, 95% to 99%10% to 20%, 20% to 25%, 25% to 30%, 30% to 40%, 40% to 50%, 50% to 60%, 60% to 70%, 70% to 75%, 75% to 80%, 80% to 85%, 85% to 90%, 90% to 95%, 95% to 99%, 98% or more induced as compared to an unmodified bacteria of the same subtype under the same conditions. In some embodiments, IL-6 is at least about 0 to 1.0-fold, 1.0-1.2-fold, 1.2-1.4-fold, 1.4-1.6-fold, 1.6-1.8-fold, 1.8-2-fold, or two-fold more induced than observed with than unmodified bacteria of the same bacterial subtype under the same conditions. In yet another embodiment, the IL-6 is about 2 to 3-fold, 3 to 4-fold, 4 to 5-fold, 5 to 6-fold, 6 to 7-fold, 7 to 8-fold, 8 to 9-fold, 9 to 10-fold, 10 to 15-fold, 15 to 20-fold, 20 to 30-fold, 30 to 40-fold, or 40 to 50-fold, 50 to 100-fold, 100 to 500-fold, or 500 to 1000-fold or more induced than observed with unmodified bacteria of the same bacterial subtype under the same conditions. In one embodiment, the gene encoded by the bacteria is dacA and the levels of induced IL-6 is about two to three-fold greater than observed with unmodified bacteria of the same bacterial subtype under the same conditions.

[0451] In some embodiments, the levels of IL-1beta in the tumor is at least about 0 to 10%, 10% to 20%, 20% to 25%, 25% to 30%, 30% to 40%, 40% to 50%, 50% to 60%, 60% to 70%, 70% to 75%, 75% to 80%, 80% to 85%, 85% to 90%, 90% to 95%, 95% to 99%10% to 20%, 20% to 25%, 25% to 30%, 30% to 40%, 40% to 50%, 50% to 60%, 60% to 70%, 70% to 75%, 75% to 80%, 80% to 85%, 85% to 90%, 90% to 95%, 95% to 99%, 98% or more elevated as compared to an unmodified bacteria of the same subtype under the same conditions. In some embodiments, the levels of IL-1beta are at least about 0 to 1.0-fold, 1.0-1.2-fold, 1.2-1.4-fold, 1.4-1.6-fold, 1.6-1.8-fold, 1.8-2-fold, or two-fold or more elevated than observed with than unmodified bacteria of the same bacterial subtype under the same conditions. In yet another embodiment, levels of IL-1beta are about 2 to 3-fold, 3 to 4-fold, 4 to 5-fold, 5 to 6-fold, 6 to 7-fold, 7 to 8-fold, 8 to 9-fold, 9 to 10-fold, 10 to 15-fold, 15 to 20-fold, 20 to 30-fold, 30 to 40-fold, or 40 to 50-fold, 50 to 100-fold, 100 to 500-fold, or 500 to 1000-fold or more elevated than observed with unmodified bacteria of the same bacterial subtype under the same conditions. In one embodiment, the gene encoded by the bacteria is a diadenylate cyclase, e.g., DacA, a di-GAMP synthase, and/or other STING agonist producing polypeptide and levels of IL-1beta are about 2 fold, 3 fold, or 4 fold more than observed with unmodified bacteria of the same bacterial subtype under the same conditions.

[0452] In some embodiments, the levels of MCP1 in the tumor is at least about 0 to 10%, 10% to 20%, 20% to 25%, 25% to 30%, 30% to 40%, 40% to 50%, 50% to 60%, 60% to 70%, 70% to 75%, 75% to 80%, 80% to 85%, 85% to 90%, 90% to 95%, 95% to 99%10% to 20%, 20% to 25%, 25% to 30%, 30% to 40%, 40% to 50%, 50% to 60%, 60% to 70%, 70% to 75%, 75% to 80%, 80% to 85%, 85% to 90%, 90% to 95%, 95% to 99%, 98% or more elevated as compared to an unmodified bacteria of the same subtype under the same conditions. In some embodiments, the levels of MCP1 are at least about 0 to 1.0-fold, 1.0-1.2-fold, 1.2-1.4-fold, 1.4-1.6-fold, 1.6-1.8-fold, 1.8-2-fold, or two-fold or more elevated than observed with than unmodified bacteria of the same bacterial subtype under the same conditions. In yet another embodiment, levels of MCP1 are about 2 to 3-fold, 3 to 4-fold, 4 to 5-fold, 5 to 6-fold, 6 to 7-fold, 7 to 8-fold, 8 to 9-fold, 9 to 10-fold, 10 to 15-fold, 15 to 20-fold, 20 to 30-fold, 30 to 40-fold, or 40 to 50-fold, 50 to 100-fold, 100 to 500-fold, or 500 to 1000-fold or more elevated than observed with unmodified bacteria of the same bacterial subtype under the same conditions. In one embodiment, the gene encoded by the bacteria is a diadenylate cyclase, e.g., DacA, a di-GAMP synthase, and/or other STING agonist producing polypeptide and levels of MCP1 are about 2-fold, 3-fold, or 4-fold more than observed with unmodified bacteria of the same bacterial subtype under the same conditions.

[0453] In some embodiments, the genetically engineered bacteria comprising gene sequences encoding diadenylate cyclases, e.g., DacA, di-GAMP synthases, and/or other STING agonist producing polypeptides achieve activation of molecules relevant towards an effector-T-cell response, including but not limited to, Granzyme B, IL-2, and IL-15.

[0454] In some embodiments, the levels of granzyme B in the tumor is at least about 0 to 10%, 10% to 20%, 20% to 25%, 25% to 30%, 30% to 40%, 40% to 50%, 50% to 60%, 60% to 70%, 70% to 75%, 75% to 80%, 80% to 85%, 85% to 90%, 90% to 95%, 95% to 99%10% to 20%, 20% to 25%, 25% to 30%, 30% to 40%, 40% to 50%, 50% to 60%, 60% to 70%, 70% to 75%, 75% to 80%, 80% to 85%, 85% to 90%, 90% to 95%, 95% to 99%, 98% or more elevated as compared to an unmodified bacteria of the same subtype under the same conditions. In some embodiments, the levels of granzyme B are at least about 0 to 1.0-fold, 1.0-1.2-fold, 1.2-1.4-fold, 1.4-1.6-fold, 1.6-1.8-fold, 1.8-2-fold, or two-fold or more elevated than observed with than unmodified bacteria of the same bacterial subtype under the same conditions. In yet another embodiment, levels of granzyme B are about 2 to 3-fold, 3 to 4-fold, 4 to 5-fold, 5 to 6-fold, 6 to 7-fold, 7 to 8-fold, 8 to 9-fold, 9 to 10-fold, 10 to 15-fold, 15 to 20-fold, 20 to 30-fold, 30 to 40-fold, or 40 to 50-fold, 50 to 100-fold, 100 to 500-fold, or 500 to 1000-fold or more elevated than observed with unmodified bacteria of the same bacterial subtype under the same conditions. In one embodiment, the gene encoded by the bacteria is a diadenylate cyclase, e.g., DacA, a di-GAMP synthase, and/or other STING agonist producing polypeptide and levels of granzyme B are about 2 fold, 3 fold, or 4 fold more than observed with unmodified bacteria of the same bacterial subtype under the same conditions.

[0455] In some embodiments, the levels of IL-2 in the tumor is at least about 0 to 10%, 10% to 20%, 20% to 25%, 25% to 30%, 30% to 40%, 40% to 50%, 50% to 60%, 60% to 70%, 70% to 75%, 75% to 80%, 80% to 85%, 85% to 90%, 90% to 95%, 95% to 99%10% to 20%, 20% to 25%, 25% to 30%, 30% to 40%, 40% to 50%, 50% to 60%, 60% to 70%, 70% to 75%, 75% to 80%, 80% to 85%, 85% to 90%, 90% to 95%, 95% to 99%, 98% or more elevated as compared to an unmodified bacteria of the same subtype under the same conditions. In some embodiments, the levels of IL-2 are at least about 0 to 1.0-fold, 1.0-1.2-fold, 1.2-1.4-fold, 1.4-1.6-fold, 1.6-1.8-fold, 1.8-2-fold, or two-fold or more elevated than observed with than unmodified bacteria of the same bacterial subtype under the same conditions. In yet another embodiment, levels of IL-2 are about 2 to 3-fold, 3 to 4-fold, 4 to 5-fold, 5 to 6-fold, 6 to 7-fold, 7 to 8-fold, 8 to 9-fold, 9 to 10-fold, 10 to 15-fold, 15 to 20-fold, 20 to 30-fold, 30 to 40-fold, or 40 to 50-fold, 50 to 100-fold, 100 to 500-fold, or 500 to 1000-fold or more elevated than observed with unmodified bacteria of the same bacterial subtype under the same conditions. In one embodiment, the gene encoded by the bacteria is DacA and the levels of IL-2 are about 3 fold, 4 fold, or 5 fold more than observed with unmodified bacteria of the same bacterial subtype under the same conditions.

[0456] In some embodiments, the levels of IL-15 in the tumor is at least about 0 to 10%, 10% to 20%, 20% to 25%, 25% to 30%, 30% to 40%, 40% to 50%, 50% to 60%, 60% to 70%, 70% to 75%, 75% to 80%, 80% to 85%, 85% to 90%, 90% to 95%, 95% to 99%10% to 20%, 20% to 25%, 25% to 30%, 30% to 40%, 40% to 50%, 50% to 60%, 60% to 70%, 70% to 75%, 75% to 80%, 80% to 85%, 85% to 90%, 90% to 95%, 95% to 99%, 98% or more elevated as compared to an unmodified bacteria of the same subtype under the same conditions. In some embodiments, the levels of IL-15 are at least about 0 to 1.0-fold, 1.0-1.2-fold, 1.2-1.4-fold, 1.4-1.6-fold, 1.6-1.8-fold, 1.8-2-fold, or two-fold or more elevated than observed with than unmodified bacteria of the same bacterial subtype under the same conditions. In yet another embodiment, levels of IL-15 are at least about 2 to 3-fold, 3 to 4-fold, 4 to 5-fold, 5 to 6-fold, 6 to 7-fold, 7 to 8-fold, 8 to 9-fold, 9 to 10-fold, 10 to 15-fold, 15 to 20-fold, 20 to 30-fold, 30 to 40-fold, or 40 to 50-fold, 50 to 100-fold, 100 to 500-fold, or 500 to 1000-fold or more elevated than observed with unmodified bacteria of the same bacterial subtype under the same conditions. In one embodiment, gene encoded by the bacteria is DacA and the levels of IL-15 are about 2-fold, 3-fold, -fold, or 5-fold more than observed with unmodified bacteria of the same bacterial subtype under the same conditions.

[0457] In some embodiments, the levels of IFNg in the tumor is at least about 0 to 10%, 10% to 20%, 20% to 25%, 25% to 30%, 30% to 40%, 40% to 50%, 50% to 60%, 60% to 70%, 70% to 75%, 75% to 80%, 80% to 85%, 85% to 90%, 90% to 95%, 95% to 99%10% to 20%, 20% to 25%, 25% to 30%, 30% to 40%, 40% to 50%, 50% to 60%, 60% to 70%, 70% to 75%, 75% to 80%, 80% to 85%, 85% to 90%, 90% to 95%, 95% to 99%, 98% or more elevated as compared to an unmodified bacteria of the same subtype under the same conditions. In some embodiments, the levels of IFNg are at least about 0 to 1.0-fold, 1.0-1.2-fold, 1.2-1.4-fold, 1.4-1.6-fold, 1.6-1.8-fold, 1.8-2-fold, or two-fold or more elevated than observed with than unmodified bacteria of the same bacterial subtype under the same conditions. In yet another embodiment, levels of IFNg are at least about 2 to 3-fold, 3 to 4-fold, 4 to 5-fold, 5 to 6-fold, 6 to 7-fold, 7 to 8-fold, 8 to 9-fold, 9 to 10-fold, 10 to 15-fold, 15 to 20-fold, 20 to 30-fold, 30 to 40-fold, or 40 to 50-fold, 50 to 100-fold, 100 to 500-fold, or 500 to 1000-fold or more elevated than observed with unmodified bacteria of the same bacterial subtype under the same conditions. In one embodiment, the gene encoded by the bacteria is a diadenylate cyclase, e.g., DacA, di-GAMP synthase, and/or other STING agonist producing polypeptide and levels of IFNg are about 2 fold, 3 fold, or 4 fold more than observed with unmodified bacteria of the same bacterial subtype under the same conditions.

[0458] In some embodiments, the levels of IL-12 in the tumor is at least about 0 to 10%, 10% to 20%, 20% to 25%, 25% to 30%, 30% to 40%, 40% to 50%, 50% to 60%, 60% to 70%, 70% to 75%, 75% to 80%, 80% to 85%, 85% to 90%, 90% to 95%, 95% to 99%10% to 20%, 20% to 25%, 25% to 30%, 30% to 40%, 40% to 50%, 50% to 60%, 60% to 70%, 70% to 75%, 75% to 80%, 80% to 85%, 85% to 90%, 90% to 95%, 95% to 99%, 98% or more elevated as compared to an unmodified bacteria of the same subtype under the same conditions. In some embodiments, the levels of IL-12 are at least about 0 to 1.0-fold, 1.0-1.2-fold, 1.2-1.4-fold, 1.4-1.6-fold, 1.6-1.8-fold, 1.8-2-fold, or two-fold or more elevated than observed with than unmodified bacteria of the same bacterial subtype under the same conditions. In yet another embodiment, levels of IL-12 are at least about 2 to 3-fold, 3 to 4-fold, 4 to 5-fold, 5 to 6-fold, 6 to 7-fold, 7 to 8-fold, 8 to 9-fold, 9 to 10-fold, 10 to 15-fold, 15 to 20-fold, 20 to 30-fold, 30 to 40-fold, or 40 to 50-fold, 50 to 100-fold, 100 to 500-fold, or 500 to 1000-fold or more elevated than observed with unmodified bacteria of the same bacterial subtype under the same conditions. In one embodiment, the gene encoded by the bacteria is a diadenylate cyclase, e.g., DacA, a di-GAMP synthase, and/or other STING agonist producing polypeptide and levels of IL-12 are about 2 fold, 3 fold, or 4 fold more than observed with unmodified bacteria of the same bacterial subtype under the same conditions.

[0459] In some embodiments, the levels of TNF-a in the tumor is at least about 0% to 10%, 10% to 20%, 20% to 25%, 25% to 30%, 30% to 40%, 40% to 50%, 50% to 60%, 60% to 70%, 70% to 75%, 75% to 80%, 80% to 85%, 85% to 90%, 90% to 95%, 95% to 99%10% to 20%, 20% to 25%, 25% to 30%, 30% to 40%, 40% to 50%, 50% to 60%, 60% to 70%, 70% to 75%, 75% to 80%, 80% to 85%, 85% to 90%, 90% to 95%, 95% to 99%, 98% or more elevated as compared to an unmodified bacteria of the same subtype under the same conditions. In some embodiments, the levels of TNF-a are at least about 0 to 1.0-fold, 1.0-1.2-fold, 1.2-1.4-fold, 1.4-1.6-fold, 1.6-1.8-fold, 1.8-2-fold, or two-fold or more elevated than observed with than unmodified bacteria of the same bacterial subtype under the same conditions. In yet another embodiment, levels of TNF-a are at least about 2 to 3-fold, 3 to 4-fold, 4 to 5-fold, 5 to 6-fold, 6 to 7-fold, 7 to 8-fold, 8 to 9-fold, 9 to 10-fold, 10 to 15-fold, 15 to 20-fold, 20 to 30-fold, 30 to 40-fold, or 40 to 50-fold, 50 to 100-fold, 100 to 500-fold, or 500 to 1000-fold or more elevated than observed with unmodified bacteria of the same bacterial subtype under the same conditions. In one embodiment, the gene encoded by the bacteria is a diadenylate cyclase, e.g., DacA, a di-GAMP synthase, and/or other STING agonist producing polypeptide and levels of TNF-a are at least about 2 fold, 3 fold, or 4 fold more than observed with unmodified bacteria of the same bacterial subtype under the same conditions.

[0460] In some embodiments, the levels of GM-CSF in the tumor is at least about 0 to 10%, 10% to 20%, 20% to 25%, 25% to 30%, 30% to 40%, 40% to 50%, 50% to 60%, 60% to 70%, 70% to 75%, 75% to 80%, 80% to 85%, 85% to 90%, 90% to 95%, 95% to 99%10% to 20%, 20% to 25%, 25% to 30%, 30% to 40%, 40% to 50%, 50% to 60%, 60% to 70%, 70% to 75%, 75% to 80%, 80% to 85%, 85% to 90%, 90% to 95%, 95% to 99%, 98% or more elevated as compared to an unmodified bacteria of the same subtype under the same conditions. In some embodiments, the levels of GM-CSF are at least about 0 to 1.0-fold, 1.0-1.2-fold, 1.2-1.4-fold, 1.4-1.6-fold, 1.6-1.8-fold, 1.8-2-fold, or two-fold or more elevated than observed with than unmodified bacteria of the same bacterial subtype under the same conditions. In yet another embodiment, levels of GM-CSF are about 2 to 3-fold, 3 to 4-fold, 4 to 5-fold, 5 to 6-fold, 6 to 7-fold, 7 to 8-fold, 8 to 9-fold, 9 to 10-fold, 10 to 15-fold, 15 to 20-fold, 20 to 30-fold, 30 to 40-fold, or 40 to 50-fold, 50 to 100-fold, 100 to 500-fold, or 500 to 1000-fold or more elevated than observed with unmodified bacteria of the same bacterial subtype under the same conditions. In one embodiment, the gene encoded by the bacteria is a diadenylate cyclase, e.g., DacA, a di-GAMP synthase, and/or other STING agonist producing polypeptide and levels of GM-CSF are at least about 2 fold, 3 fold, or 4 fold more than observed with unmodified bacteria of the same bacterial subtype under the same conditions.

[0461] In some embodiments, administration of the genetically engineered bacteria comprising gene sequences encoding one or more of a diadenylate cyclase, e.g., DacA, a di-GAMP synthase, and/or other STING agonist producing polypeptide results in long-term immunological memory. In some embodiments, long term immunological memory is established, exemplified by at least about 0 to 10%, 10% to 20%, 20% to 25%, 25% to 30%, 30% to 40%, 40% to 50%, 50% to 60%, 60% to 70%, 70% to 75%, 75% to 80%, 80% to 85%, 85% to 90%, 90% to 95%, 95% to 99%10% to 20%, 20% to 25%, 25% to 30%, 30% to 40%, 40% to 50%, 50% to 60%, 60% to 70%, 70% to 75%, 75% to 80%, 80% to 85%, 85% to 90%, 90% to 95%, 95% to 99%, 98% or more protection from secondary tumor challenge compared to naïve age-matched controls. In some embodiments, long term immunological memory is established, exemplified by at least about 0 to 1.0-fold, 1.0-1.2-fold, 1.2-1.4-fold, 1.4-1.6-fold, 1.6-1.8-fold, 1.8-2-fold, or two-fold or more protection from secondary tumor challenge compared to naïve age-matched controls. In yet another embodiment, long term immunological memory is established, exemplified by at least about 2 to 3-fold, 3 to 4-fold, 4 to 5-fold, 5 to 6-fold, 6 to 7-fold, 7 to 8-fold, 8 to 9-fold, 9 to 10-fold, 10 to 15-fold, 15 to 20-fold, 20 to 30-fold, 30 to 40-fold, or 40 to 50-fold, 50 to 100-fold, 100 to 500-fold, or 500 to 1000-fold or more protection from secondary tumor challenge compared to naïve age-matched controls.

[0462] In some embodiments, the c-di-GAMP synthases, diadenylate cyclases, or other STING agonist producing polypeptides are modified and/or mutated, e.g., to enhance stability, or to increase STING agonism. In some embodiments, c-di-GAMP synthases from Vibrio cholerae or the orthologs thereof thereof (e.g., from Verminephrobacter eiseniae, Kingella denitrificans, and/or Neisseria bacilliformis) or human cGAS is modified and/or mutated, e.g., to enhance stability, or to increase STING agonism. In some embodiments, the diadenylate cyclase from Listeria monocytogenes is modified and/or mutated, e.g., to enhance stability, or to increase STING agonism.

[0463] In some embodiments, the genetically engineered bacteria and/or other microorganisms are capable of producing one or more diadenylate cyclases, c-di-GAMP synthases and/or other STING agonist producing polypeptides under inducing conditions, e.g., under a condition(s) associated with immune suppression and/or tumor microenvironment. In some embodiments, the genetically engineered bacteria and/or other microorganisms are capable of producing the diadenylate cyclases, c-di-GAMP synthases and/or other STING agonist producing polypeptides in low-oxygen conditions or hypoxic conditions, in the presence of certain molecules or metabolites, in the presence of molecules or metabolites associated with cancer, or certain tissues, immune suppression, or inflammation, or in the presence of a metabolite that may or may not be present in the gut, circulation, or the tumor, and which may be present in vitro during strain culture, expansion, production and/or manufacture such as arabinose, cumate, and salicylate. In some embodiments, the one or more genetically engineered bacteria comprise gene sequence(s) encoding the diadenylate cyclases, c-di-GAMP synthases and/or other STING agonist producing polypeptides, wherein the diadenylate cyclases, c-di-GAMP synthases and/or other STING agonist producing polypeptides are operably linked to a promoter inducible by exogenous environmental conditions of the tumor microenvironment. In some embodiments, the exogenous environmental conditions of the tumor microenvironment are low oxygen conditions. In some embodiments, the one or more genetically engineered bacteria comprise gene sequence(s) encoding the diadenylate cyclases, c-di-GAMP synthases and/or other STING agonist producing polypeptides, wherein the diadenylate cyclases, c-di-GAMP synthases and/or other STING agonist producing polypeptides is operably linked to a promoter inducible by cumate or salicylate as described herein. In some embodiments, the gene sequences encoding diadenylate cyclases, c-di-GAMP synthases and/or other STING agonist producing polypeptides are operably linked to a constitutive promoter. In some embodiments, the gene sequences encoding diadenylate cyclases, c-di-GAMP synthases and/or other STING agonist producing polypeptides are present on one or more plasmids (e.g., high copy or low copy) or are integrated into one or more sites in the bacteria and/or other microorganism chromosome(s).

[0464] In any of these embodiments, any of the STING agonist producing strains described herein may comprise an auxotrophic modification. In any of these embodiments, the STING agonist producing strains may comprise an auxotrophic modification in DapA, e.g., a deletion or mutation in DapA. In any of these embodiments, the STING agonist producing strains may further comprise an auxotrophic modification in ThyA e.g., a deletion or mutation in ThyA. In any of these embodiments, the STING agonist producing strains may comprise a DapA and a ThyA auxotrophy. In any of these embodiments, the bacteria may further comprise an endogenous phage modification, e.g., a mutation or deletion, in an endogenous phage. In a non-limiting example the bacterial host is E. coli Nissle and the phage modification comprises a modification in Nissle Phage 3, described herein. In one example, the phage modification is a deletion of one or more genes, e.g., a 10 kb deletion.

[0465] In any of these embodiments describing genetically engineered bacteria comprising gene sequences encoding one or more diadenylate cyclases, c-di-GAMP synthases or other STING agonist producing polypeptides, the genetically engineered bacteria may further comprise gene sequence(s) encoding kynureninase, e.g., kynureninase from Pseudomonas fluorescens and (optionally) having a modification, e.g., mutation or deletion in the TrpE gene. Alternatively the genetically engineered bacteria comprising gene sequences encoding one or more diadenylate cyclases, c-di-GAMP synthases or other STING agonist producing polypeptides may be combined or administered with genetically engineered bacteria comprising gene sequence(s) encoding kynureninase, e.g., kynureninase from Pseudomonas fluorescens and (optionally) having a modification, e.g., mutation or deletion in the TrpE gene.

[0466] In certain embodiments, one or more genetically engineered bacteria comprise gene sequence(s) encoding diadenylate cyclase e.g., DacA, e.g., from Listeria monocytogenes, wherein diadenylate cyclase gene is operably linked to a promoter inducible under exogenous environmental conditions, e.g., conditions in the tumor microenvironment. In one embodiment, the diadenylate cyclase gene is operably linked to a promoter inducible under low oxygen conditions, e.g., a FNR promoter. In certain embodiments, one or more genetically engineered bacteria comprise gene sequence(s) encoding diadenylate cyclase, e.g., dacA, e.g., from Listeria monocytogenes, wherein diadenylate cyclase is operably linked to a promoter inducible by cumate or salicylate as described herein. In certain embodiments, the diadenylate cyclase gene sequences are integrated into the bacterial chromosome. Suitable integration sites are described herein. In a non-limiting example the diadenylate cyclase gene is integrated at HA910. In certain embodiments, the bacteria comprising gene sequences encoding the diadenylate cyclase further comprise an auxotrophic modification. In some embodiments, the modification, e.g., a mutation or deletion is in the dapA gene. In some embodiments, the modification, e.g., a mutation or deletion is in the thyA gene. In some embodiments, the modification, e.g., a mutation or deletion is in both dapA and thyA genes. In any of these embodiments, the bacteria may further comprise a phage modification, e.g., a mutation or deletion in an endogenous prophage. In one example, the prophage modification is a deletion of one or more genes, e.g., a 10 kb deletion. In a non-limiting example, the genetically engineered bacteria comprising gene sequences encoding diadenylate cyclase are derived from E. coli Nissle and the prophage modification comprises a deletion or mutation in Nissle Prophage 3, described herein.

[0467] In certain embodiments genetically engineered bacteria comprising gene sequences encoding one or more diadenylate cyclases, the genetically engineered bacteria may further comprise gene sequence(s) encoding kynureninase, e.g., kynureninase from Pseudomonas fluorescens and (optionally) having a modification, e.g., mutation or deletion in the TrpE gene. Alternatively the genetically engineered bacteria comprising gene sequences encoding one or more diadenylate cyclases may be combined or administered with genetically engineered bacteria comprising gene sequence(s) encoding kynureninase, e.g., kynureninase from Pseudomonas fluorescens and (optionally) having a modification, e.g., mutation or deletion in the TrpE gene.

[0468] In one specific embodiment, one or more genetically engineered bacteria comprise gene sequence(s) encoding diadenylate cyclase e.g., DacA, e.g., from Listeria monocytogenes, wherein the diadenylate cyclase gene is operably linked to a promoter inducible under low oxygen conditions, e.g., a FNR promoter. The dacA gene sequences are integrated into the bacterial chromosome, e.g., at integration site HA910. The bacteria further comprise a auxotrophic modification, e.g., a mutation or deletion in dapA or thyA or both genes. The bacteria may further comprise an endogenous phage modification, e.g., a mutation or deletion, in an endogenous phage, e.g., a 10 kb deletion. In one specific embodiment, the genetically engineered bacteria are derived from E. coli Nissle and the phage modification comprises a deletion or mutation in Nissle Phage 3, e.g., as described herein.

[0469] In another specific embodiment, the genetically engineered bacteria may further comprise gene sequence(s) encoding kynureninase, e.g., kynureninase from Pseudomonas fluorescens and (optionally) having a modification, e.g., mutation or deletion in the TrpE gene. Alternatively the genetically engineered bacteria may be combined or administered with genetically engineered bacteria comprising gene sequence(s) encoding kynureninase, e.g., kynureninase from Pseudomonas fluorescens and (optionally) having a modification, e.g., mutation or deletion in the TrpE gene.

[0470] In certain embodiments, one or more genetically engineered bacteria comprise gene sequence(s) encoding cGAMP synthase e.g., human cGAS, wherein the cGAS gene is operably linked to a promoter inducible under exogenous environmental conditions, e.g., conditions in the tumor microenvironment. In one embodiment, the cGAS gene is operably linked to a promoter inducible under low oxygen conditions, e.g., a FNR promoter. In certain embodiments, one or more genetically engineered bacteria comprise gene sequence(s) encoding cGAS, e.g., human cGAS, wherein the cGAS gene is operably linked to a promoter inducible by cumate or salicylate as described herein. In certain embodiments, the cGAS gene sequences are integrated into the bacterial chromosome. Suitable integration sites are described herein and known in the art. In certain embodiments, the bacteria comprising gene sequences encoding cGAS further comprise an auxotrophic modification, e.g., a mutation or deletion in dapA or thyA or both genes. In some embodiments, the modification, e.g., a mutation or deletion is in the dapA gene. In some embodiments, the modification, e.g., a mutation or deletion is in thyA gene. In some embodiments, the modification, e.g., a mutation or deletion is in both dapA and thyA genes. In any of these embodiments, the bacteria may further comprise a prophage modification, e.g., a mutation or deletion, in an endogenous prophage. In one example, the prophage modification is a deletion of one or more genes, e.g., a 10 kb deletion. In a non-limiting example, the genetically engineered bacteria comprising gene sequences encoding cGAS are derived from E. coli Nissle and the prophage modification comprises a deletion or mutation in Nissle Phage 3, described herein.

[0471] In any of these embodiments describing genetically engineered bacteria comprising gene sequences encoding one or more cGAS, the genetically engineered bacteria may further comprise gene sequence(s) encoding kynureninase, e.g., kynureninase from Pseudomonas fluorescens and (optionally) having a modification, e.g., mutation or deletion in the TrpE gene. Alternatively the genetically engineered bacteria comprising gene sequences encoding one or more cGAS may be combined or administered with genetically engineered bacteria comprising gene sequence(s) encoding kynureninase, e.g., kynureninase from Pseudomonas fluorescens and (optionally) having a modification, e.g., mutation or deletion in the TrpE gene.

[0472] In one embodiment, one or more genetically engineered bacteria comprise gene sequence(s) encoding cGAS e.g., human cGAS, wherein the cGAS gene is operably linked to a promoter inducible under low oxygen conditions, e.g., an FNR promoter. The cGAS gene sequences are integrated into the bacterial chromosome. The bacteria further comprise an auxotrophic modification, e.g., a mutation or deletion in dapA or thyA or both genes. The bacteria may further comprise an endogenous phage modification, e.g., a mutation or deletion, in an endogenous phage, e.g., a 10 kb deletion. In one specific embodiment, the genetically engineered bacteria are derived from E. coli Nissle and the phage modification comprises a deletion or mutation in Nissle Phage 3, e.g., as described herein.

[0473] In another specific embodiment, the genetically engineered bacteria comprising gene sequences encoding one or more cGAS, the genetically engineered bacteria may further comprise gene sequence(s) encoding kynureninase, e.g., kynureninase from Pseudomonas fluorescens and (optionally) having a modification, e.g., mutation or deletion in the TrpE gene. Alternatively the genetically engineered bacteria comprising gene sequences encoding one or more cGAS may be combined or administered with genetically engineered bacteria comprising gene sequence(s) encoding kynureninase, e.g., kynureninase from Pseudomonas fluorescens and (optionally) having a modification, e.g., mutation or deletion in the TrpE gene.

[0474] In certain embodiments, one or more genetically engineered bacteria comprise gene sequence(s) encoding diadenylate cyclase e.g., DacA, e.g., from Listeria monocytogenes, and cGAMP synthase e.g., human cGAS. In certain embodiments, the diadenylate cyclase gene and/or the cGAS gene are operably linked to a promoter inducible under exogenous environmental conditions, e.g., conditions in the tumor microenvironment. In certain embodiments, the diadenylate cyclase gene and/or cGAS gene are operably linked to a promoter inducible by cumate or salicylate, or another chemical inducer. In certain embodiments, the diadenylate cyclase gene and/or cGAS gene are operably linked to a constitutive promoter. In one embodiment, the diadenylate cyclase gene and/or cGAS gene is operably linked to a promoter inducible under low oxygen conditions, e.g., an FNR promoter. In certain embodiments, one or more genetically engineered bacteria comprise gene sequence(s) encoding diadenylate cyclase gene, e.g., dacA, e.g., from Listeria monocytogenes, and cGAS, e.g., human cGAS, wherein the diadenylate cyclase gene and/or cGAS gene is operably linked to a promoter inducible by cumate or salicylate as described herein. In certain embodiments, the diadenylate cyclase and cGAS gene sequences are integrated into the bacterial chromosome. Suitable integration sites are described herein and known in the art. In certain embodiments, the bacteria comprising gene sequences encoding diadenylate cyclase and cGAS further comprise a mutation or deletion in dapA or thyA or both genes. In any of these embodiments, the bacteria may further comprise a prophage modification, e.g., a mutation or deletion, in an endogenous prophage. In one example, the prophage modification is a deletion of one or more genes, e.g., a 10 kb deletion. In a non-limiting example, the genetically engineered bacteria comprising gene sequences encoding diadenylate cyclase and cGAS are derived from E. coli Nissle and the prophage modification comprises a deletion or mutation in Nissle Phage 3, described herein.

[0475] In any of these embodiments describing genetically engineered bacteria comprising gene sequences encoding one or more diadenylate cyclases and cGAS producing polypeptides, the genetically engineered bacteria may further comprise gene sequence(s) encoding kynureninase, e.g., kynureninase from Pseudomonas fluorescens and (optionally) having a modification, e.g., mutation or deletion in the TrpE gene. Alternatively the genetically engineered bacteria comprising gene sequences encoding one or more diadenylate cyclases and cGAS polypeptides may be combined or administered with genetically engineered bacteria comprising gene sequence(s) encoding kynureninase, e.g., kynureninase from Pseudomonas fluorescens and (optionally) having a modification, e.g., mutation or deletion in the TrpE gene.

[0476] In one specific embodiment, one or more genetically engineered bacteria comprise gene sequence(s) encoding diadenylate cyclase e.g., DacA, e.g., from Listeria monocytogenes, and cGAS e.g., human cGAS, wherein the diadenylate cyclase gene and/or cGAS gene is operably linked to a promoter inducible under low oxygen conditions, e.g., an FNR promoter. The diadenylate cyclase gene and cGAS gene sequences are integrated into the bacterial chromosome. The bacteria further comprise an auxotrophic modification, e.g., a mutation or deletion in dapA or thyA or both genes. The bacteria may further comprise an endogenous phage modification, e.g., a mutation or deletion, in an endogenous phage, e.g., a 10 kb deletion. In one specific embodiment, the genetically engineered bacteria are derived from E. coli Nissle and the phage modification comprises a deletion or mutation in Nissle Phage 3, e.g., as described herein.

[0477] In another specific embodiment, the genetically engineered bacteria comprising gene sequences encoding one or more diadenylate cyclases and cGAS polypeptides, the genetically engineered bacteria may further comprise gene sequence(s) encoding kynureninase, e.g., kynureninase from Pseudomonas fluorescens and (optionally) having a modification, e.g., mutation or deletion in the TrpE gene. Alternatively, the genetically engineered bacteria comprising gene sequences encoding one or more diadenylate cyclases and cGAS polypeptides may be combined or administered with genetically engineered bacteria comprising gene sequence(s) encoding kynureninase, e.g., kynureninase from Pseudomonas fluorescens and (optionally) having a modification, e.g., mutation or deletion in the TrpE gene.

[0478] In any of these embodiments, the one or more bacteria genetically engineered to produce one or more STING agonists may be administered alone or in combination with one or more immune checkpoint inhibitors described herein, including but not limited to anti-CTLA4, anti-PD1, or anti-PD-L1 antibodies. In some embodiments, the one or more genetically engineered bacteria which produce STING agonists evoke immunological memory when administered in combination with checkpoint inhibitor therapy.

[0479] In any of these embodiments, the one or more bacteria genetically engineered to produce STING agonists may be genetically engineered to produce and secrete or display on their surface one or more immune checkpoint inhibitors described herein, including but not limited to anti-CTLA4, anti-PD1, or anti-PD-L1 antibodies. In some embodiments, the one or more genetically engineered bacteria which comprise gene sequences encoding one or more enzymes for STING agonist production and gene sequences encoding one or more immune checkpoint inhibitor antibodies, e.g., scFv antibodies, promote immunological memory upon rechallenge/reoccurrence of a tumor.

[0480] In any of these embodiments, the one or more bacteria genetically engineered to produce one or more STING agonists may be administered alone or in combination with one or more immune stimulatory agonists described herein, e.g., agonistic antibodies, including but not limited to anti-OX40, anti-41BB, or anti-GITR antibodies. In some embodiments, the one or more genetically engineered bacteria which produce STING agonists evoke immunological memory when administered in combination with anti-OX40, anti-41BB, or anti-GITR antibodies.

[0481] In any of these embodiments, the one or more bacteria genetically engineered to produce STING agonists may be genetically engineered to produce and secrete or display on their surface one or more immune stimulatory agonists described herein, e.g., agonistic antibodies, including but not limited to anti-OX40, anti-41BB, or anti-GITR antibodies. In some embodiments, the one or more genetically engineered bacteria comprising gene sequences encoding one or more STING agonist producing enzymes and gene sequences encoding one or more costimulatory antibodies, e.g., selected from anti-OX40, anti-41BB, or anti-GITR antibodies evoke immunological memory.

[0482] In one embodiment, administration of the STING agonist producing strain elicits an abscopal effect when administered alone or in combination with checkpoint inhibitor therapy and/or costimulatory antibodies, e.g., selected from anti-OX40, anti-41BB, or anti-GITR antibodies. In one embodiment, administration of genetically engineered bacteria comprising one or more genes encoding diadenylate cyclase, e.g., DacA, e.g., from Listeria monocytogenes, elicits an abscopal effect. In one embodiment, the abscopal effect is observed between day 2 and day 3. In one embodiment, administration of genetically engineered bacteria comprising one or more genes encoding cGAS, e.g., human cGAS, elicits an abscopal effect.

[0483] Also, in some embodiments, the genetically engineered bacteria and/or other microorganisms are further capable of expressing any one or more of the described circuits and further comprise one or more of the following: (1) one or more auxotrophies, such as any auxotrophies known in the art and provided herein, e.g., dapA and thyA auxotrophy, (2) one or more kill switch circuits, such as any of the kill-switches described herein or otherwise known in the art, (3) one or more antibiotic resistance circuits, (4) one or more transporters for importing biological molecules or substrates, such any of the transporters described herein or otherwise known in the art, (5) one or more secretion circuits, such as any of the secretion circuits described herein and otherwise known in the art, (6) one or more surface display circuits, such as any of the surface display circuits described herein and otherwise known in the art (7) one or more circuits for the production or degradation of one or more metabolites (e.g., kynurenine, tryptophan, adenosine, arginine) described herein, (8) one or more immune initiators (e.g. STING agonist, CD40L, SIRPα) described herein, (9) one or more immune sustainers (e.g. IL-15, IL-12, CXCL10) described herein, and (10) combinations of one or more of such additional circuits.

### CD40

[0484] CD40 is a costimulatory protein found on antigen presenting cells and is required for their activation. The binding of CD154 (CD40L) on T helper cells to CD40 activates antigen presenting cells and induces a variety of downstream immunostimulatory effects. In some embodiments, the immune modulator is an agonist of CD40, for example, an agonist selected from an agonistic anti-CD40 antibody, agonistic anti-CD40 antibody fragment, CD40 ligand (CD40L) polypeptide, and CD40L polypeptide fragment. Thus, in some embodiments, the genetically engineered bacteria comprise sequence(s) encoding an agonistic anti-CD40 antibody or fragment thereof, or a CD40 ligand (CD40L) polypeptide or fragment thereof.

[0485] Thus, in some embodiments, the engineered bacteria is engineered to produce an agonistic anti-CD40 antibody or fragment thereof, or a CD40 ligand (CD40L) polypeptide or fragment thereof. In some embodiments, the engineered bacteria comprises sequence to encode an agonistic anti-CD40 antibody or fragment thereof, or a CD40 ligand (CD40L) polypeptide or fragment thereof. In some embodiments, the engineered bacteria comprise gene sequence encoding one or more copies of an antibody directed against CD40. In some embodiments, the CD40 is human CD40. In some embodiments, the anti-CD40 antibody is an scFv. In some embodiments, the anti-CD40 antibody is secreted. In some embodiments, the anti-CD40 antibody is displayed on the cell surface. In any of these embodiments, the gene sequences encoding the agonistic anti-CD40 antibody or fragment thereof, or a CD40 ligand (CD40L) polypeptide or fragment thereof further encode a secretion tag, e.g., as described herein.

[0486] In any of these embodiments, the genetically engineered bacteria produce at least about 0% to 2% to 4%, 4% to 6%,6% to 8%, 8% to 10%, 10% to 12%, 12% to 14%, 14% to 16%, 16% to 18%, 18% to 20%, 20% to 25%,25% to 30%, 30% to 35%, 35% to 40%,40% to 45% 45% to 50%, 50% to 55%, 55% to 60%, 60% to 65%, 65% to 70% to 80%, 80% to 90%, or 90% to 100% more CD40 ligand than unmodified bacteria of the same bacterial subtype under the same conditions. In yet another embodiment, the genetically engineered bacteria produce at least about 1.0-1.2-fold, 1.2-1.4-fold, 1.4-1.6-fold, 1.6-1.8-fold, 1.8-2-fold, or two-fold more CD40 ligand than unmodified bacteria of the same bacterial subtype under the same conditions. In yet another embodiment, the genetically engineered bacteria produce three-fold, four-fold, five-fold, six-fold, seven-fold, eight-fold, nine-fold, ten-fold, fifteen-fold, twenty-fold, thirty-fold, forty-fold, or fifty-fold, hundred-fold, five hundred-fold, or one-thousand-fold more CD40 ligand than unmodified bacteria of the same bacterial subtype under the same conditions.

[0487] In any of these embodiments, the bacteria genetically engineered to produce CD40 ligand secrete at least about 0% to 2% to 4%, 4% to 6%,6% to 8%, 8% to 10%, 10% to 12%, 12% to 14%, 14% to 16%, 16% to 18%, 18% to 20%, 20% to 25%,25% to 30%, 30% to 35%, 35% to 40%,40% to 45% 45% to 50%, 50% to 55%, 55% to 60%, 60% to 65%, 65% to 70% to 80%, 80% to 90%, or 90% to 100% more CD40 ligand than unmodified bacteria of the same bacterial subtype under the same conditions. In yet another embodiment, the genetically engineered bacteria secrete at least about 1.0-1.2-fold, 1.2-1.4-fold, 1.4-1.6-fold, 1.6-1.8-fold, 1.8-2-fold, or two-fold more CD40 ligand than unmodified bacteria of the same bacterial subtype under the same conditions. In yet another embodiment, the genetically engineered bacteria secrete three-fold, four-fold, five-fold, six-fold, seven-fold, eight-fold, nine-fold, ten-fold, fifteen-fold, twenty-fold, thirty-fold, forty-fold, or fifty-fold, hundred-fold, five hundred-fold, or one-thousand-fold more CD40 ligand than unmodified bacteria of the same bacterial subtype under the same conditions.

[0488] In some embodiments, the bacteria genetically engineered to secrete CD40 ligand are capable of reducing cell proliferation by at least about 10% to 20%, 20% to 25%, 25% to 30%, 30% to 40%, 40% to 50%, 50% to 60%, 60% to 70%, 70% to 75%, 75% to 80%, 80% to 85%, 85% to 90%, 90% to 95%, 95% to 99%, or more as compared to an unmodified bacteria of the same subtype under the same conditions. In some embodiments, the bacteria genetically engineered to secrete CD40 ligand are capable of reducing tumor growth by at least about 10% to 20%, 20% to 25%, 25% to 30%, 30% to 40%, 40% to 50%, 50% to 60%, 60% to 70%, 70% to 75%, 75% to 80%, 80% to 85%, 85% to 90%, 90% to 95%, 95% to 99%, or more as compared to an unmodified bacteria of the same subtype under the same conditions. In some embodiments, the bacteria genetically engineered to secrete CD40 ligand are capable of reducing tumor size by at least about 10% to 20%, 20% to 25%, 25% to 30%, 30% to 40%, 40% to 50%, 50% to 60%, 60% to 70%, 70% to 75%, 75% to 80%, 80% to 85%, 85% to 90%, 90% to 95%, 95% to 99%, or more as compared to an unmodified bacteria of the same subtype under the same conditions. In some embodiments, the bacteria genetically engineered to produce CD40 ligand are capable of reducing tumor volume by at least about 10% to 20%, 20% to 25%, 25% to 30%, 30% to 40%, 40% to 50%, 50% to 60%, 60% to 70%, 70% to 75%, 75% to 80%, 80% to 85%, 85% to 90%, 90% to 95%, 95% to 99%, or more as compared to an unmodified bacteria of the same subtype under the same conditions. In some embodiments, the bacteria genetically engineered to produce CD40 ligand are capable of reducing tumor weight by at least about 10% to 20%, 20% to 25%, 25% to 30%, 30% to 40%, 40% to 50%, 50% to 60%, 60% to 70%, 70% to 75%, 75% to 80%, 80% to 85%, 85% to 90%, 90% to 95%, 95% to 99%, or more as compared to an unmodified bacteria of the same subtype under the same conditions. In some embodiments, the bacteria genetically engineered to produce CD40 ligand are capable of increasing the response rate by at least about 10% to 20%, 20% to 25%, 25% to 30%, 30% to 40%, 40% to 50%, 50% to 60%, 60% to 70%, 70% to 75%, 75% to 80%, 80% to 85%, 85% to 90%, 90% to 95%, 95% to 99%, or more as compared to an unmodified bacteria of the same subtype under the same conditions. In some embodiments, the bacteria genetically engineered to produce CD40 ligand are capable of increasing CCR7 expression on dendritic cells and/or macrophages.

[0489] In some embodiments, CCR7 is at least about 10% to 20%, 20% to 25%, 25% to 30%, 30% to 40%, 40% to 50%, 50% to 60%, 60% to 70%, 70% to 75%, 75% to 80%, 80% to 85%, 85% to 90%, 90% to 95%, 95% to 99%, 98% or more induced as compared to an unmodified bacteria of the same subtype under the same conditions. In some embodiments, CCR7 is about 1.0-1.2-fold, 1.2-1.4-fold, 1.4-1.6-fold, 1.6-1.8-fold, 1.8-2-fold, or two-fold more induced than observed with than unmodified bacteria of the same bacterial subtype under the same conditions. In yet another embodiment, the CCR7 is about three-fold, four-fold, five-fold, six-fold, seven-fold, eight-fold, nine-fold, ten-fold, fifteen-fold, twenty-fold, thirty-fold, forty-fold, or fifty-fold, hundred-fold, five hundred-fold, or one-thousand-fold or more induced than observed with unmodified bacteria of the same bacterial subtype under the same conditions. In one embodiment, the levels of induced CCR7 in macrophages 25%-55%, about 30-45% greater than observed with unmodified bacteria of the same bacterial subtype under the same conditions.

[0490] In one embodiment, the levels of induced CCR7 in dendritic cells is about two fold greater than observed with unmodified bacteria of the same bacterial subtype under the same conditions.

[0491] In some embodiments, the bacteria genetically engineered to produce CD40 ligand are capable of increasing CCR7 expression on dendritic cells and/or macrophages.

[0492] In some embodiments, CD40 is at least about 10% to 20%, 20% to 25%, 25% to 30%, 30% to 40%, 40% to 50%, 50% to 60%, 60% to 70%, 70% to 75%, 75% to 80%, 80% to 85%, 85% to 90%, 90% to 95%, 95% to 99%, 98% or more induced as compared to an unmodified bacteria of the same subtype under the same conditions. In some embodiments, CD40 is about 1.0-1.2-fold, 1.2-1.4-fold, 1.4-1.6-fold, 1.6-1.8-fold, 1.8-2-fold, or two-fold more induced than observed with than unmodified bacteria of the same bacterial subtype under the same conditions. In yet another embodiment, the CD40 is about three-fold, four-fold, five-fold, six-fold, seven-fold, eight-fold, nine-fold, ten-fold, fifteen-fold, twenty-fold, thirty-fold, forty-fold, or fifty-fold, hundred-fold, five hundred-fold, or one-thousand-fold or more induced than observed with unmodified bacteria of the same bacterial subtype under the same conditions. In one embodiment, the levels of induced CD40 in macrophages 30-50% greater than observed with unmodified bacteria of the same bacterial subtype under the same conditions.

[0493] In one embodiment, the levels of induced CD40 in dendritic cells is about 10% greater than observed with unmodified bacteria of the same bacterial subtype under the same conditions.

[0494] Accordingly, in one embodiment, the genetically engineered bacteria encode a CD40 Ligand polypeptide that has about 80%, 81%, 82%, 83%, 84%, 85%, 86%, 87%, 88%, 89%, 90%, 91%, 92%, 93%, 94%, 95%, 96%, 97%, 98%, or 99% identity with one or more of SEQ ID NO: 1093. In another embodiment, the polypeptide comprises SEQ ID NO: 1093. In yet another embodiment, the polypeptide expressed by the genetically engineered bacteria consists of SEQ ID NO: 1093.

[0495] In some embodiments, the genetically engineered microorganisms are capable of expressing any one or more of the described circuits encoding an agonistic anti-CD40 antibody or fragment thereof, or a CD40 ligand (CD40L) polypeptide or fragment thereof in low-oxygen conditions, and/or in the presence of cancer and/or the tumor microenvironment, or tissue specific molecules or metabolites, and/or in the presence of molecules or metabolites associated with inflammation or immune suppression, and/or in the presence of metabolites that may be present in the gut, and/or in the presence of metabolites that may or may not be present in vivo, and may be present in vitro during strain culture, expansion, production and/or manufacture, such as arabinose, cumate, and salicylate and others described herein. In some embodiments, the gene sequences(s) are controlled by a promoter inducible by such conditions and/or inducers. In some embodiments such an inducer may be administered in vivo to induce effector gene expression. In some embodiments, the gene sequences(s) are controlled by a constitutive promoter, as described herein. In some embodiments, the gene sequences(s) are controlled by a constitutive promoter, and are expressed in in vivo conditions and/or in vitro conditions, e.g., during expansion, production and/or manufacture, as described herein. In some embodiments, any one or more of the described circuits are present on one or more plasmids (e.g., high copy or low copy) or are integrated into one or more sites in the microorganismal chromosome.

[0496] In any of these embodiments, the genetically engineered bacteria comprising gene sequence(s) encoding an agonistic anti-CD40 antibody or fragment thereof, or a CD40 ligand (CD40L) polypeptide or fragment thereof further comprise gene sequence(s) encoding one or more further effector molecule(s), i.e., therapeutic molecule(s) or a metabolic converter(s). In any of these embodiments, the circuit encoding an agonistic anti-CD40 antibody or fragment thereof, or a CD40 ligand (CD40L) polypeptide or fragment thereof may be combined with a circuit encoding one or more immune initiators or immune sustainers as described herein, in the same or a different bacterial strain (combination circuit or mixture of strains). The circuit encoding the immune initiators or immune sustainers may be under the control of a constitutive or inducible promoter, e.g., low oxygen inducible promoter or any other constitutive or inducible promoter described herein.

[0497] In any of these embodiments, the gene sequence(s) encoding an agonistic anti-CD40 antibody or fragment thereof, or a CD40 ligand (CD40L) polypeptide or fragment thereof may be combined with gene sequence(s) encoding one or more STING agonist producing enzymes, as described herein, in the same or a different bacterial strain (combination circuit or mixture of strains). In some embodiments, the gene sequences which are combined with the gene sequence(s) encoding an agonistic anti-CD40 antibody or fragment thereof, or a CD40 ligand (CD40L) polypeptide or fragment thereof encode DacA. DacA may be under the control of a constitutive or inducible promoter, e.g., low oxygen inducible promoter such as FNR or any other constitutive or inducible promoter described herein. In some embodiments, the dacA gene is integrated into the chromosome. In some embodiments, the gene sequences which are combined with the gene sequence(s) encoding an agonistic anti-CD40 antibody or fragment thereof, or a CD40 ligand (CD40L) polypeptide or fragment thereof encode cGAS. cGAS may be under the control of a constitutive or inducible promoter, e.g., low oxygen inducible promoter such as FNR or any other constitutive or inducible promoter described herein. In some embodiments, the gene encoding cGAS is integrated into the chromosome.

[0498] In any of these combination embodiments, the bacteria may further comprise an auxotrophic modification, e.g., a mutation or deletion in DapA, ThyA, or both. In any of these embodiments, the bacteria may further comprise a phage modification, e.g., a mutation or deletion, in an endogenous prophage as described herein.

[0499] Also, in some embodiments, the genetically engineered microorganisms are capable of expressing any one or more of the described circuits encoding an agonistic anti-CD40 antibody or fragment thereof, or a CD40 ligand (CD40L) polypeptide or fragment thereof and further comprise one or more of the following: (1) one or more auxotrophies, such as any auxotrophies known in the art and provided herein, e.g., thyA auxotrophy, (2) one or more kill switch circuits, such as any of the kill-switches described herein or otherwise known in the art, (3) one or more antibiotic resistance circuits, (4) one or more transporters for importing biological molecules or substrates, such any of the transporters described herein or otherwise known in the art, (5) one or more secretion circuits, such as any of the secretion circuits described herein and otherwise known in the art, (6) one or more surface display circuits, such as any of the surface display circuits described herein and otherwise known in the art and (7) one or more circuits for the production or degradation of one or more metabolites (e.g., kynurenine, tryptophan, adenosine, arginine) described herein (8) combinations of one or more of such additional circuits. In any of these embodiments, the genetically engineered bacteria may be administered alone or in combination with one or more immune checkpoint inhibitors described herein, including but not limited anti-CTLA4, anti-PD1, or anti-PD-L1 antibodies.

### GMCSF

[0500] Granulocyte-macrophage colony-stimulating factor (GM-CSF), also known as colony stimulating factor 2 (CSF2), is a monomeric glycoprotein secreted by macrophages, T cells, mast cells, NK cells, endothelial cells and fibroblasts. GM-CSF is a white blood cell growth factor that functions as a cytokine, facilitating the development of the immune system and promoting defense against infections. For example, GM-CSF stimulates stem cells to produce granulocytes (neutrophils, eosinophils, and basophils) and monocytes, which monocytes exit the circulation and migrate into tissue, whereupon they mature into macrophages and dendritic cells. GM-CSF is part of the immune/inflammatory cascade, by which activation of a small number of macrophages rapidly lead to an increase in their numbers, a process which is crucial for fighting infection. GM-CSF signals via the signal transducer and activator of transcription, STATS or via STAT3 (which activates macrophages).

[0501] In some embodiments, the genetically engineered bacteria are capable of producing an immune modulator that modulates dendritic cell activation. In some embodiments, the immune modulator is GM-CSF. Thus, in some embodiments, the engineered bacteria is engineered to produce GM-CSF. In some embodiments, the engineered bacteria comprises sequence that encodes GM-CSF. In some embodiments, the engineered bacteria comprises sequence to encode GM-CSF and sequence to encode a secretory peptide(s) for the secretion of GM-CSF. Exemplary secretion tags and secretory methods are described herein.

[0502] In some embodiments, the genetically engineered microorganisms are capable of expressing any one or more of the described GM-CSF circuits in low-oxygen conditions, and/or in the presence of cancer and/or in the tumor microenvironment, or tissue specific molecules or metabolites, and/or in the presence of molecules or metabolites associated with inflammation or immune suppression, and/or in the presence of metabolites that may be present in the gut, and/or in the presence of metabolites that may or may not be present in vivo, and may be present in vitro during strain culture, expansion, production and/or manufacture, such as arabinose, cumate, and salicylate and others described herein. In some embodiments such an inducer may be administered in vivo to induce effector gene expression. In some embodiments, the gene sequences(s) encoding GM-CSF are controlled by a promoter inducible by such conditions and/or inducers. In some embodiments, the gene sequences(s) encoding GM-CSF are controlled by a constitutive promoter, as described herein. In some embodiments, the gene sequences(s) are controlled by a constitutive promoter, and are expressed in in vivo conditions and/or in vitro conditions, e.g., during expansion, production and/or manufacture, as described herein. In some embodiments, any one or more of the described genes sequences encoding GM-CSF are present on one or more plasmids (e.g., high copy or low copy) or are integrated into one or more sites in the microorganismal chromosome.

[0503] In any of these embodiments, the genetically engineered bacteria comprising gene sequence(s) encoding GM-CSF further comprise gene sequence(s) encoding one or more further effector molecule(s), i.e., therapeutic molecule(s) or a metabolic converter(s). In any of these embodiments, the circuit encoding GM-CSF may be combined with a circuit encoding one or more immune initiators or immune sustainers as described herein, in the same or a different bacterial strain (combination circuit or mixture of strains). The circuit encoding the immune initiators or immune sustainers may be under the control of a constitutive or inducible promoter, e.g., low oxygen inducible promoter or any other constitutive or inducible promoter described herein.

[0504] In any of these embodiments, the gene sequence(s) encoding GM-CSF may be combined with gene sequence(s) encoding one or more STING agonist producing enzymes, as described herein, in the same or a different bacterial strain (combination circuit or mixture of strains). In some embodiments, the gene sequences which are combined with the gene sequence(s) encoding GM-CSF encode DacA.

[0505] DacA may be under the control of a constitutive or inducible promoter, e.g., low oxygen inducible promoter such as FNR or any other constitutive or inducible promoter described herein. In some embodiments, the dacA gene is integrated into the chromosome. In some embodiments, the gene sequences which are combined with the gene sequence(s) encoding GM-CSF encode cGAS. cGAS may be under the control of a constitutive or inducible promoter, e.g., low oxygen inducible promoter such as FNR or any other constitutive or inducible promoter described herein. In some embodiments, the gene encoding cGAS is integrated into the chromosome.

[0506] In any of these combination embodiments, the bacteria may further comprise an auxotrophic modification, e.g., a mutation or deletion in DapA, ThyA, or both. In any of these embodiments, the bacteria may further comprise a phage modification, e.g., a mutation or deletion, in an endogenous prophage as described herein.

[0507] In some embodiments, the genetically engineered microorganisms are capable of expressing any one or more of the described circuits encoding GM-CSF and further comprise one or more of the following: (1) one or more auxotrophies, such as any auxotrophies known in the art and provided herein, e.g., thyA auxotrophy, (2) one or more kill switch circuits, such as any of the kill-switches described herein or otherwise known in the art, (3) one or more antibiotic resistance circuits, (4) one or more transporters for importing biological molecules or substrates, such any of the transporters described herein or otherwise known in the art, (5) one or more secretion circuits, such as any of the secretion circuits described herein and otherwise known in the art, (6) one or more surface display circuits, such as any of the surface display circuits described herein and otherwise known in the art and (7) one or more circuits for the production or degradation of one or more metabolites (e.g., kynurenine, tryptophan, adenosine, arginine) described herein (8) combinations of one or more of such additional circuits. In any of these embodiments, the genetically engineered bacteria may be administered alone or in combination with one or more immune checkpoint inhibitors described herein, including but not limited anti-CTLA4, anti-PD1, or anti-PD-L1 antibodies.

### Activation and Priming of Effector Immune Cells (Immune Stimulators)

### T-Cell Activators

### Cytokines and Cytokine Receptors

[0508] CD4 (4) is a glycoprotein found on the surface of immune cells such as cells, monocytes, macrophages, and dendritic cells. CD4+T helper cells are white blood cells that function to send signals to other types of immune cells, thereby assisting other immune cells in immunologic processes, including maturation of B cells Into plasma cells and memory B cells, and activation of cytotoxic T cells and macrophages. T helper cells become activated when they are presented with peptide antigens by MHC class II molecules, which are expressed on the surface of antigen-presenting cells (APCs). Once activated, T helper cells divide and secrete cytokines that regulate or assist in the active immune response. T helper cells can differentiate into one of several subtypes, including TH1, TH2, TH3, TH17, TH9, or TFH cells, which secrete different cytokines to facilitate different types of immune responses.

[0509] Cytotoxic T cells (TC cells, or CTLs) destroy virus-infected cells and tumor cells, and are also implicated in transplant rejection. These cells are also known as CD8+ T cells since they express the CD8 glycoprotein at their surfaces. Cytotoxic T cells recognize their targets by binding to antigen associated with MHC class I molecules, which are present on the surface of all nucleated cells.

[0510] In some embodiments, the genetically engineered microorganisms, e.g., genetically engineered bacteria, are capable of producing one or more effector molecules or immune modulator, that modulates one or more T effector cells, e.g., CD4+ cell and/or CD8+ cell. In some embodiments, the genetically engineered bacteria are capable of producing one or more effector molecules that activate, stimulate, and/or induce the differentiation of one or more T effector cells, e.g., CD4+ and/or CD8+ cells. In some embodiments, the immune modulator is a cytokine that activates, stimulates, and/or induces the differentiation of a T effector cell, e.g., CD4+ and/or CD8+ cells. In some embodiments, the genetically engineered bacteria produce one or more cytokines selected from IL-2, IL-15, IL-12, IL-7, IL-21, IL-18, TNF, and IFN-gamma. As used herein, the production of one or more cytokines includes fusion proteins which comprise one or more cytokines, which are fused through a peptide linked to another cytokine or other immune modulatory molecule. Examples include but are not limited to IL-12 and IL-15 fusion proteins. In general, all agonists and antagonists described herein may be fused to another polypeptide of interest through a peptide linker, to improve or alter their function. For example, in some embodiments, the genetically engineered bacteria comprise sequence(s) encoding one or more cytokines selected from IL-2, IL-15, IL-12, IL-7, IL-21, IL-18, TNF, and IFN-gamma. “In some embodiments, the genetically engineered microorganisms encode one or more cytokine fusion proteins. Non-limiting examples of such fusion proteins include one or more cytokine polypeptides operably linked to an antibody polypeptide, wherein the antibody recognizes a tumor-specific antigen, thereby bringing the cytokine(s) into proximity with the tumor.

[0511] Interleukin 12 (IL-12) is a cytokine, the actions of which create an interconnection between the innate and adaptive immunity. IL-12 is secreted by a number of immune cells, including activated dendritic cells, monocytes, macrophages, and neutrophils, as well as other cell types. IL-12 is a heterodimeric protein (IL-12-p′70; IL-12-p35/p40) consisting of p35 and p40 subunits, and binds to a receptor composed of two subunits, IL-12R-β1 and IL-12R-β2. IL-12 receptor is expressed constitutively or inducibly on a number of immune cells, including NK cells, T, and B lymphocytes. Upon binding of IL-12, the receptor is activated and downstream signaling through the JAK/STAT pathway initiated, resulting in the cellular response to IL-12. IL-12 acts by increasing the production of IFN-γ, which is the most potent mediator of IL-12 actions, from NK and T cells. In addition, IL-12 promotes growth and cytotoxicity of activated NK cells, CD8+ and CD4+ T cells, and shifts the differentiation of CD4+Th0 cells toward the Th1 phenotype. Further, IL-12 enhances of antibody-dependent cellular cytotoxicity (ADCC) against tumor cells and the induction of IgG and suppression of IgE production from B cells. In addition, IL-12 also plays a role in reprogramming of myeloid-derived suppressor cells, directs the Th1-type immune response and helps increase expression of MHC class I molecules (e.g., reviewed in Waldmann et al., Cancer Immunol Res March 2015 3; 219).

[0512] Thus, in some embodiments, the engineered bacteria is engineered to produce IL-12. In some embodiments, the engineered bacteria comprises sequence to encode IL-12 (i.e., the p35 and p40 subunits). In some embodiments, the engineered bacteria is engineered to over-express IL-12, for example, operatively linked to a strong promoter and/or comprising more than one copy of the IL-12 gene sequence. In some embodiments, the engineered bacteria comprises sequence(s) encoding two or more copies of IL-12, e.g., two, three, four, five, six or more copies of IL-12 gene. In some embodiments, the engineered bacteria produce one or more immune modulators that stimulate the production of IL-12. In some embodiments, the engineered bacteria comprises sequence to encode IL-12 and sequence to encode a secretory peptide(s) for the secretion of IL-12.

[0513] In some embodiments, the genetically engineered bacteria comprise a gene sequence in which two interleukin-12 monomer subunits (IL-12A (p35) and IL-12B (p40)) is covalently linked by a linker In some embodiments, the linker is a serine glycine rich linker. In one embodiment, the gene sequence encodes construct in which a 15 amino acid linker of ‘GGGGSGGGGSGGGGS’ (SEQ ID NO: 1247) is inserted between two monomer subunits (IL-12A (p35) and IL-12B (p40) to produce a forced dimer human IL-12 (diIL-12) fusion protein. In some embodiments, the gene sequence is codon optimized for expression, e.g., for expression in E. coli. In any of the embodiments, in which the genetically engineered bacteria comprise a gene sequence for the expression of IL-12, in which the two subunits are linked, the gene sequence may further comprise a secretion tag. The secretion tag includes any of the secretion tags described herein or known in the art.

[0514] In some embodiments, the genetically engineered bacteria comprise a gene sequence encoding a IL-12 (p35) subunit linked to the IL-12 (p40) subunit having at least about 80% identity with a sequence selected from SEQ ID NO: 1169, SEQ ID NO: 1170, SEQ ID NO: 1171, SEQ ID NO: 1172, SEQ ID NO: 1173, SEQ ID NO: 1174, SEQ ID NO: 1175, SEQ ID NO: 1176, SEQ ID NO: 1177, SEQ ID NO: 1178, SEQ ID NO: 1179, SEQ ID NO: 1191, SEQ ID NO: 1192, SEQ ID NO: 1193, and SEQ ID NO: 1194. In some embodiments, the genetically engineered bacteria comprise a gene sequence encoding a IL-12 (p35) subunit linked to the IL-12 (p40) subunit that has about having at least about 90% identity with a sequence selected from SEQ ID NO: 1169, SEQ ID NO: 1170, SEQ ID NO: 1171, SEQ ID NO: 1172, SEQ ID NO: 1173, SEQ ID NO: 1174, SEQ ID NO: 1175, SEQ ID NO: 1176, SEQ ID NO: 1177, SEQ ID NO: 1178, SEQ ID NO: 1179, SEQ ID NO: 1191, SEQ ID NO: 1192, SEQ ID NO: 1193, and SEQ ID NO: 1194. In some embodiments, the genetically engineered bacteria comprise a gene sequence encoding a IL-12 (p35) subunit linked to the IL-12 (p40) subunit that has about having at least about 95% identity with a sequence selected from SEQ ID NO: 1169, SEQ ID NO: 1170, SEQ ID NO: 1171, SEQ ID NO: 1172, SEQ ID NO: 1173, SEQ ID NO: 1174, SEQ ID NO: 1175, SEQ ID NO: 1176, SEQ ID NO: 1177, SEQ ID NO: 1178, SEQ ID NO: 1179, SEQ ID NO: 1191, SEQ ID NO: 1192, SEQ ID NO: 1193, and SEQ ID NO: 1194. In some embodiments, the genetically engineered bacteria comprise a gene sequence encoding a IL-12 (p35) subunit linked to the IL-12 (p40) subunit that has about 80%, 81%, 82%, 83%, 84%, 85%, 86%, 87%, 88%, 89%, 90%, 91%, 92%, 93%, 94%, 95%, 96%, 97%, 98%, or 99% identity to a sequence selected from SEQ ID NO: 1169, SEQ ID NO: 1170, SEQ ID NO: 1171, SEQ ID NO: 1172, SEQ ID NO: 1173, SEQ ID NO: 1174, SEQ ID NO: 1175, SEQ ID NO: 1176, SEQ ID NO: 1177, SEQ ID NO: 1178, SEQ ID NO: 1179, SEQ ID NO: 1191, SEQ ID NO: 1192, SEQ ID NO: 1193, and SEQ ID NO: 1194, or a functional fragment thereof. In another embodiment, the IL-12 (p35) subunit linked to the IL-12 (p40) subunit comprises a sequence selected from SEQ ID NO: 1169, SEQ ID NO: 1170, SEQ ID NO: 1171, SEQ ID NO: 1172, SEQ ID NO: 1173, SEQ ID NO: 1174, SEQ ID NO: 1175, SEQ ID NO: 1176, SEQ ID NO: 1177, SEQ ID NO: 1178, SEQ ID NO: 1179, SEQ ID NO: 1191, SEQ ID NO: 1192, SEQ ID NO: 1193, and SEQ ID NO: 1194. In yet another embodiment, the IL-12 (p35) subunit linked to the IL-12 (p40) subunit expressed by the genetically engineered bacteria consists of a sequence selected from SEQ ID NO: 1169, SEQ ID NO: 1170, SEQ ID NO: 1171, SEQ ID NO: 1172, SEQ ID NO: 1173, SEQ ID NO: 1174, SEQ ID NO: 1175, SEQ ID NO: 1176, SEQ ID NO: 1177, SEQ ID NO: 1178, SEQ ID NO: 1179, SEQ ID NO: 1191, SEQ ID NO: 1192, SEQ ID NO: 1193, and SEQ ID NO: 1194. In any of these embodiments wherein the genetically engineered bacteria encode IL-12 (p35) subunit linked to the IL-12 (p40) subunit, one or more of the sequences encoding a Tag, such as V5, FLAG or His Tags, are removed. In other embodiments, the secretion tag is removed and replaced by a different secretion tag.

[0515] In any of these embodiments, the genetically engineered bacteria produce at least about 0% to 2% to 4%, 4% to 6%,6% to 8%, 8% to 10%, 10% to 12%, 12% to 14%, 14% to 16%, 16% to 18%, 18% to 20%, 20% to 25%,25% to 30%, 30% to 35%, 35% to 40%,40% to 45% 45% to 50%, 50% to 55%, 55% to 60%, 60% to 65%, 65% to 70% to 80%, 80% to 90%, or 90% to 100% more IL-12 than unmodified bacteria of the same bacterial subtype under the same conditions. In yet another embodiment, the genetically engineered bacteria produce at least about 1.0-1.2-fold, 1.2-1.4-fold, 1.4-1.6-fold, 1.6-1.8-fold, 1.8-2-fold, or two-fold more IL-12 than unmodified bacteria of the same bacterial subtype under the same conditions. In yet another embodiment, the genetically engineered bacteria produce at least about three-fold, four-fold, five-fold, six-fold, seven-fold, eight-fold, nine-fold, ten-fold, fifteen-fold, twenty-fold, thirty-fold, forty-fold, or fifty-fold, hundred-fold, five hundred-fold, or one-thousand-fold more IL-12 than unmodified bacteria of the same bacterial subtype under the same conditions.

[0516] In any of these embodiments, the genetically engineered bacteria produce at least about 5-10, 10-20, 20-30, 30-40, 40-50, 50-60, 60-70, 80-90, 90-100, 100-150, 150-200, 200-250, 250-300, 300-350, 350-400 pg/ml of media, e.g., after 4 hours of induction. In one embodiment, the genetically engineered bacteria produce at least about 195, 200, 210, 220, 230, 240, 250, 260, 270, 280, 290, 300, 310, 320, 330, 340, 350, 360, 370, 380, 390, 400, 410, 420, 430, 440, 450, 460, 470, 480, 490 or 500, pg/ml of media, e.g., after 4 hours of induction.

[0517] In any of these embodiments, the bacteria genetically engineered to produce IL-12 secrete at least about 0% to 2% to 4%, 4% to 6%,6% to 8%, 8% to 10%, 10% to 12%, 12% to 14%, 14% to 16%, 16% to 18%, 18% to 20%, 20% to 25%,25% to 30%, 30% to 35%, 35% to 40%,40% to 45% 45% to 50%, 50% to 55%, 55% to 60%, 60% to 65%, 65% to 70% to 80%, 80% to 90%, or 90% to 100% more IL-12 than unmodified bacteria of the same bacterial subtype under the same conditions. In yet another embodiment, the genetically engineered bacteria secrete at least about 1.0-1.2-fold, 1.2-1.4-fold, 1.4-1.6-fold, 1.6-1.8-fold, 1.8-2-fold, or two-fold more IL-12 than unmodified bacteria of the same bacterial subtype under the same conditions. In yet another embodiment, the genetically engineered bacteria secrete at least about three-fold, four-fold, five-fold, six-fold, seven-fold, eight-fold, nine-fold, ten-fold, fifteen-fold, twenty-fold, thirty-fold, forty-fold, or fifty-fold, hundred-fold, five hundred-fold, or one-thousand-fold more IL-12 than unmodified bacteria of the same bacterial subtype under the same conditions.

[0518] In some embodiments, the bacteria genetically engineered to secrete IL-12 are capable of reducing cell proliferation by at least about 10% to 20%, 20% to 25%, 25% to 30%, 30% to 40%, 40% to 50%, 50% to 60%, 60% to 70%, 70% to 75%, 75% to 80%, 80% to 85%, 85% to 90%, 90% to 95%, 95% to 99%10% to 20%, 20% to 25%, 25% to 30%, 30% to 40%, 40% to 50%, 50% to 60%, 60% to 70%, 70% to 75%, 75% to 80%, 80% to 85%, 85% to 90%, 90% to 95%, 95% to 99%, or more as compared to an unmodified bacteria of the same subtype under the same conditions. In some embodiments, the bacteria genetically engineered to secrete IL-12 are capable of reducing tumor growth by at least about 10% to 20%, 20% to 25%, 25% to 30%, 30% to 40%, 40% to 50%, 50% to 60%, 60% to 70%, 70% to 75%, 75% to 80%, 80% to 85%, 85% to 90%, 90% to 95%, 95% to 99%10% to 20%, 20% to 25%, 25% to 30%, 30% to 40%, 40% to 50%, 50% to 60%, 60% to 70%, 70% to 75%, 75% to 80%, 80% to 85%, 85% to 90%, 90% to 95%, 95% to 99%, or more as compared to an unmodified bacteria of the same subtype under the same conditions. In some embodiments, the bacteria genetically engineered to secrete IL-12 are capable of reducing tumor size by at least about 10% to 20%, 20% to 25%, 25% to 30%, 30% to 40%, 40% to 50%, 50% to 60%, 60% to 70%, 70% to 75%, 75% to 80%, 80% to 85%, 85% to 90%, 90% to 95%, 95% to 99%, or more as compared to an unmodified bacteria of the same subtype under the same conditions. In some embodiments, the bacteria genetically engineered to produce IL-12 are capable of reducing tumor volume by at least about 10% to 20%, 20% to 25%, 25% to 30%, 30% to 40%, 40% to 50%, 50% to 60%, 60% to 70%, 70% to 75%, 75% to 80%, 80% to 85%, 85% to 90%, 90% to 95%, 95% to 99%, or more as compared to an unmodified bacteria of the same subtype under the same conditions. In some embodiments, the bacteria genetically engineered to IL-12 are capable of reducing tumor weight by at least about 10% to 20%, 20% to 25%, 25% to 30%, 30% to 40%, 40% to 50%, 50% to 60%, 60% to 70%, 70% to 75%, 75% to 80%, 80% to 85%, 85% to 90%, 90% to 95%, 95% to 99%, or more as compared to an unmodified bacteria of the same subtype under the same conditions. In some embodiments, the bacteria genetically engineered to produce IL-12 are capable of increasing the response rate by at least about 10% to 20%, 20% to 25%, 25% to 30%, 30% to 40%, 40% to 50%, 50% to 60%, 60% to 70%, 70% to 75%, 75% to 80%, 80% to 85%, 85% to 90%, 90% to 95%, 95% to 99%, or more as compared to an unmodified bacteria of the same subtype under the same conditions.

[0519] IL-15 displays pleiotropic functions in homeostasis of both innate and adaptive immune system and binds to IL-15 receptor, a heterotrimeric receptor composed of three subunits. The alpha subunit is specific for IL-15, while beta (CD122) and gamma (CD132) subunits are shared with the IL-2 receptor, and allow shared signaling through the JAK/STAT pathways. IL-15 is produced by several cell types, including dendritic cells, monocytes and macrophages. Co-expression of IL-15Rα and IL-15 produced in the same cell, allows intracellular binding of IL-15 to IL-15Rα, which is then shuttled to the cell surface as a complex. Once on the cell surface, then, the IL-15Rα of these cells is able to trans-present IL-15 to IL-15Rβ-γc of CD8 T cells, NK cells, and NK-T cells, which do not express IL-15, inducing the formation of the so-called immunological synapse. Murine and human IL-15Rα, exists both in membrane bound, and also in a soluble form. Soluble IL-15Rα (sIL-15Rα) is constitutively generated from the transmembrane receptor through proteolytic cleavage.

[0520] IL-15 is critical for lymphoid development and peripheral maintenance of innate immune cells and immunological memory of T cells, in particular natural killer (NK) and CD8+ T cell populations. In contrast to IL-2, IL-15 does not promote the maintenance of Tregs and furthermore, IL-15 has been shown to protect effector T cells from IL-2-mediated activation-induced cell death.

[0521] Consequently, delivery of IL-15 is considered a promising strategy for long-term anti-tumor immunity. In a first-in-human clinical trial of recombinant human IL-15, a 10-fold expansion of NK cells and significantly increased the proliferation of γδT cells and CD8+ T cells was observed upon treatment. In addition, IL-15 superagonists containing cytokine-receptor fusion complexes have been developed and are evaluated to increase the length of the response. These include the L-15 N72D superagonist/IL-15RαSushi-Fc fusion complex (IL-15SA/IL-15RαSu-Fc; ALT-803) (Kim et al., 2016 IL-15 superagonist/IL-15RαSushi-Fc fusion complex (IL-15SA/IL-15RαSu-Fc; ALT-803) markedly enhances specific subpopulations of NK and memory CD8+ T cells, and mediates potent anti-tumor activity against murine breast and colon carcinomas).

[0522] Thus, in some embodiments, the engineered bacteria is engineered to produce IL-15. In some embodiments, IL-15 is secreted.

[0523] The biological activity of IL-15 is greatly improved by pre-associating IL-15 with a fusion protein IL-15Rα-Fc or by direct fusion with the sushi domain of IL-15Rα (hyper-IL-15) to mimic trans-presentation of IL-15 by cell-associated IL-15Rα. IL-15, either administrated alone or as a complex with IL-15Rα, exhibits potent antitumor activities in animal models (Cheng et al., Immunotherapy of metastatic and autochthonous liver cancer with IL-15/IL-15Rα fusion protein; Oncoimmunology. 2014; 3(11): e963409, and references therein).

[0524] In some embodiments, the engineered bacteria comprises gene sequences encoding IL-15. In some embodiments, the engineered bacteria comprises sequence to encode IL-15Rα. In some embodiments, the engineered bacteria comprises sequence to encode IL-15 and sequence to encode IL-15Rα. In some embodiments, the engineered bacteria comprises sequence to encode a fusion polypeptide comprising IL-15 and IL-15Rα. In some embodiments, the engineered bacteria comprises sequence(s) encoding IL-15 and sequence encoding secretion tag. Exemplary secretion tags are known in the art and described herein.

[0525] In any of these embodiments, the genetically engineered bacteria produce at least about 0% to 2% to 4%, 4% to 6%,6% to 8%, 8% to 10%, 10% to 12%, 12% to 14%, 14% to 16%, 16% to 18%, 18% to 20%, 20% to 25%,25% to 30%, 30% to 35%, 35% to 40%,40% to 45% 45% to 50%, 50% to 55%, 55% to 60%, 60% to 65%, 65% to 70% to 80%, 80% to 90%, or 90% to 100% more IL-15 or IL-15/IL-15Rα fusion protein than unmodified bacteria of the same bacterial subtype under the same conditions. In yet another embodiment, the genetically engineered bacteria produce at least about 1.0-1.2-fold, 1.2-1.4-fold, 1.4-1.6-fold, 1.6-1.8-fold, 1.8-2-fold, or two-fold more IL-15 or IL-15/IL-15Rα fusion protein than unmodified bacteria of the same bacterial subtype under the same conditions. In yet another embodiment, the genetically engineered bacteria produce at least about three-fold, four-fold, five-fold, six-fold, seven-fold, eight-fold, nine-fold, ten-fold, fifteen-fold, twenty-fold, thirty-fold, forty-fold, or fifty-fold, hundred-fold, five hundred-fold, or one-thousand-fold more IL-15 or IL-15/IL-15Rα fusion protein than unmodified bacteria of the same bacterial subtype under the same conditions.

[0526] In any of these embodiments, the bacteria genetically engineered to produce IL-15 or IL-15/IL-15Rα fusion protein secrete at least about 0% to 2% to 4%, 4% to 6%,6% to 8%, 8% to 10%, 10% to 12%, 12% to 14%, 14% to 16%, 16% to 18%, 18% to 20%, 20% to 25%,25% to 30%, 30% to 35%, 35% to 40%,40% to 45% 45% to 50%, 50% to 55%, 55% to 60%, 60% to 65%, 65% to 70% to 80%, 80% to 90%, or 90% to 100% more IL-15 or IL-15/IL-15Rα fusion protein than unmodified bacteria of the same bacterial subtype under the same conditions. In yet another embodiment, the genetically engineered bacteria secrete at least about 1.0-1.2-fold, 1.2-1.4-fold, 1.4-1.6-fold, 1.6-1.8-fold, 1.8-2-fold, or two-fold more IL-15 or IL-15/IL-15Rα fusion protein than unmodified bacteria of the same bacterial subtype under the same conditions. In yet another embodiment, the genetically engineered bacteria secrete at least about three-fold, four-fold, five-fold, six-fold, seven-fold, eight-fold, nine-fold, ten-fold, fifteen-fold, twenty-fold, thirty-fold, forty-fold, or fifty-fold, hundred-fold, five hundred-fold, or one-thousand-fold more IL-15 or IL-15/IL-15Rα fusion protein than unmodified bacteria of the same bacterial subtype under the same conditions.

[0527] In some embodiments, the bacteria genetically engineered to secrete IL-15 or IL-15/IL-15Rα fusion protein are capable of reducing cell proliferation by at least about 10% to 20%, 20% to 25%, 25% to 30%, 30% to 40%, 40% to 50%, 50% to 60%, 60% to 70%, 70% to 75%, 75% to 80%, 80% to 85%, 85% to 90%, 90% to 95%, 95% to 99%, or more as compared to an unmodified bacteria of the same subtype under the same conditions. In some embodiments, the bacteria genetically engineered to secrete IL-15 or IL-15/IL-15Rα fusion protein are capable of reducing tumor growth by at least about 10% to 20%, 20% to 25%, 25% to 30%, 30% to 40%, 40% to 50%, 50% to 60%, 60% to 70%, 70% to 75%, 75% to 80%, 80% to 85%, 85% to 90%, 90% to 95%, 95% to 99%, or more as compared to an unmodified bacteria of the same subtype under the same conditions. In some embodiments, the bacteria genetically engineered to secrete IL-15 or IL-15/IL-15Rα fusion protein are capable of reducing tumor size by at least about 10% to 20%, 20% to 25%, 25% to 30%, 30% to 40%, 40% to 50%, 50% to 60%, 60% to 70%, 70% to 75%, 75% to 80%, 80% to 85%, 85% to 90%, 90% to 95%, 95% to 99%, or more as compared to an unmodified bacteria of the same subtype under the same conditions. In some embodiments, the bacteria genetically engineered to produce IL-15 or IL-15/IL-15Rα fusion protein are capable of reducing tumor volume by at least about 10% to 20%, 20% to 25%, 25% to 30%, 30% to 40%, 40% to 50%, 50% to 60%, 60% to 70%, 70% to 75%, 75% to 80%, 80% to 85%, 85% to 90%, 90% to 95%, 95% to 99%, or more as compared to an unmodified bacteria of the same subtype under the same conditions. In some embodiments, the bacteria genetically engineered to produce IL-15 or IL-15/IL-15Rα fusion protein are capable of reducing tumor weight by at least about 10% to 20%, 20% to 25%, 25% to 30%, 30% to 40%, 40% to 50%, 50% to 60%, 60% to 70%, 70% to 75%, 75% to 80%, 80% to 85%, 85% to 90%, 90% to 95%, 95% to 99%, or more as compared to an unmodified bacteria of the same subtype under the same conditions. In some embodiments, the bacteria genetically engineered to produce IL-15 or IL-15/IL-15Rα fusion protein are capable of increasing the response rate by at least about 10% to 20%, 20% to 25%, 25% to 30%, 30% to 40%, 40% to 50%, 50% to 60%, 60% to 70%, 70% to 75%, 75% to 80%, 80% to 85%, 85% to 90%, 90% to 95%, 95% to 99%, or more as compared to an unmodified bacteria of the same subtype under the same conditions.

[0528] In some embodiments, the bacteria genetically engineered to produce IL-15 or IL-15/IL-15Rα fusion protein are capable of promoting expansion of NK cells by at least about 10% to 20%, 20% to 25%, 25% to 30%, 30% to 40%, 40% to 50%, 50% to 60%, 60% to 70%, 70% to 75%, 75% to 80%, 80% to 85%, 85% to 90%, 90% to 95%, 95% to 99%, or more as compared to an unmodified bacteria of the same subtype under the same conditions. In yet another embodiment, the genetically engineered bacteria promote the expansion of NK cells to at least 1.0-1.2-fold, 1.2-1.4-fold, 1.4-1.6-fold, 1.6-1.8-fold, 1.8-2-fold, or two-fold greater extent than unmodified bacteria of the same bacterial subtype under the same conditions. In yet another embodiment, the genetically engineered bacteria promote the expansion of NK cells to a at least three-fold, four-fold, five-fold, six-fold, seven-fold, eight-fold, nine-fold, ten-fold, fifteen-fold, twenty-fold, thirty-fold, forty-fold, fifty-fold, hundred-fold, five hundred-fold, or one-thousand-fold greater extent than bacteria of the same bacterial subtype under the same conditions.

[0529] In some embodiments, the bacteria genetically engineered to produce IL-15 or IL-15/IL-15Rα fusion protein are capable of increasing the proliferation of γδT cells and/or CD8+ T cells by at least about 10% to 20%, 20% to 25%, 25% to 30%, 30% to 40%, 40% to 50%, 50% to 60%, 60% to 70%, 70% to 75%, 75% to 80%, 80% to 85%, 85% to 90%, 90% to 95%, 95% to 99%, or greater extent as compared to an unmodified bacteria of the same subtype under the same conditions. In yet another embodiment, the genetically engineered bacteria increase the proliferation of γδT cells and/or CD8+ T cells by at least 1.0-1.2-fold, 1.2-1.4-fold, 1.4-1.6-fold, 1.6-1.8-fold, 1.8-2-fold, or two-fold greater extent than unmodified bacteria of the same bacterial subtype under the same conditions. In yet another embodiment, the genetically engineered bacteria increasing the proliferation of γδT cells and/or CD8+ T cells at least three-fold, four-fold, five-fold, six-fold, seven-fold, eight-fold, nine-fold, ten-fold, fifteen-fold, twenty-fold, thirty-fold, forty-fold, fifty-fold, hundred-fold, five hundred-fold, or one-thousand-fold greater extent than unmodified bacteria of the same bacterial subtype under the same conditions.

[0530] In some embodiments, the bacteria genetically engineered to produce IL-15 or IL-15/IL-15Rα fusion protein are capable of binding to IL-15 or IL-15/IL-15Rα fusion protein receptor by at least about 10% to 20%, 20% to 25%, 25% to 30%, 30% to 40%, 40% to 50%, 50% to 60%, 60% to 70%, 70% to 75%, 75% to 80%, 80% to 85%, 85% to 90%, 90% to 95%, 95% to 99%, or greater affinity as compared to an unmodified bacteria of the same subtype under the same conditions. In yet another embodiment, the genetically engineered bacteria bind to IL-15 or IL-15/IL-15Rα fusion protein receptor with at least 1.0-1.2-fold, 1.2-1.4-fold, 1.4-1.6-fold, 1.6-1.8-fold, 1.8-2-fold, or two-fold greater affinity than unmodified bacteria of the same bacterial subtype under the same conditions. In yet another embodiment, the genetically engineered bacteria are capable of binding to IL-15 or IL-15/IL-15Rα fusion protein receptor with at least three-fold, four-fold, five-fold, six-fold, seven-fold, eight-fold, nine-fold, ten-fold, fifteen-fold, twenty-fold, thirty-fold, forty-fold, fifty-fold, hundred-fold, five hundred-fold, or one-thousand-fold or greater affinity than unmodified bacteria of the same bacterial subtype under the same conditions.

[0531] In some embodiments, the genetically engineered bacteria comprising one or more genes encoding IL-15 for secretion are capable of inducing STATS phosphorylation, e.g., in CD3+IL15RAalpha+ T-cells. In some embodiments, the bacteria genetically engineered to produce IL-15 or IL-15/IL-15Rα fusion protein are capable of inducing STATS phosphorylation by at least about 10% to 20%, 20% to 25%, 25% to 30%, 30% to 40%, 40% to 50%, 50% to 60%, 60% to 70%, 70% to 75%, 75% to 80%, 80% to 85%, 85% to 90%, 90% to 95%, 95% to 99%, or more to higher levels as compared to an unmodified bacteria of the same subtype under the same conditions. In yet another embodiment, the genetically engineered bacteria induce STATS phosphorylation with at least 1.0-1.2-fold, 1.2-1.4-fold, 1.4-1.6-fold, 1.6-1.8-fold, 1.8-2-fold, or two-fold or more to higher levels than unmodified bacteria of the same bacterial subtype under the same conditions. In yet another embodiment, the genetically engineered bacteria induce STATS phosphorylation with at least three-fold, four-fold, five-fold, six-fold, seven-fold, eight-fold, nine-fold, ten-fold, fifteen-fold, twenty-fold, thirty-fold, forty-fold, fifty-fold, hundred-fold, five hundred-fold, or one-thousand-fold or more higher levels than unmodified bacteria of the same bacterial subtype under the same conditions. In one embodiment, the IL-15 secreting strain induce STATS phosphorylation comparable to that of rhIL15 at the same amount under the same conditions.

[0532] In some embodiments, the genetically engineered bacteria comprising one or more genes encoding IL-15 for secretion are capable of inducing STAT3 phosphorylation, e.g., in CD3+IL15RAalpha+ T-cells. In some embodiments, the genetically engineered bacteria comprising one or more genes encoding IL-15 for secretion are capable of inducing STAT3 phosphorylation, e.g., in CD3+IL15RAalpha+ T-cells. In some embodiments, the bacteria genetically engineered to produce IL-15 or IL-15/IL-15Rα fusion protein are capable of inducing STAT3 phosphorylation by at least about 10% to 20%, 20% to 25%, 25% to 30%, 30% to 40%, 40% to 50%, 50% to 60%, 60% to 70%, 70% to 75%, 75% to 80%, 80% to 85%, 85% to 90%, 90% to 95%, 95% to 99%, or more to higher levels as compared to an unmodified bacteria of the same subtype under the same conditions. In yet another embodiment, the genetically engineered bacteria induce STAT3 phosphorylation with at least 1.0-1.2-fold, 1.2-1.4-fold, 1.4-1.6-fold, 1.6-1.8-fold, 1.8-2-fold, or two-fold or more to higher levels than unmodified bacteria of the same bacterial subtype under the same conditions. In yet another embodiment, the genetically engineered bacteria induce STAT3 phosphorylation with at least three-fold, four-fold, five-fold, six-fold, seven-fold, eight-fold, nine-fold, ten-fold, fifteen-fold, twenty-fold, thirty-fold, forty-fold, fifty-fold, hundred-fold, five hundred-fold, or one-thousand-fold or more higher levels than unmodified bacteria of the same bacterial subtype under the same conditions. In one embodiment, the IL-15 secreting strain induce STAT3 phosphorylation comparable to that of rhIL15 at the same amount under the same conditions.

[0533] In some embodiments, the genetically engineered bacteria comprise gene sequence(s) encoding one or more IL-15, IL-Ralpha, Linker, and IL-15-IL15Ralpha fusion polypeptide(s) having at least about 80% identity with a sequence selected from SEQ ID NO: 1133, SEQ ID NO: 1134, SEQ ID NO: 1135, SEQ ID NO: 1136. In some embodiments, the genetically engineered bacteria comprise gene sequence(s) encoding one or more IL-15, IL-Ralpha, Linker, and IL-15-IL15Ralpha fusion polypeptide(s) having at least about 90% identity with a sequence selected from SEQ ID NO: 1133, SEQ ID NO: 1134, SEQ ID NO: 1135, SEQ ID NO: 1136. In some embodiments, the genetically engineered bacteria comprise gene sequence(s) encoding one or more IL-15, IL-Ralpha, Linker, and IL-15-IL15Ralpha fusion polypeptide(s) having at least about 90% identity with a sequence selected from SEQ ID NO: 1133, SEQ ID NO: 1134, SEQ ID NO: 1135, SEQ ID NO: 1136.

[0534] In some embodiments, genetically engineered bacteria comprise a gene sequence encoding a polypeptide that is at least about 80%, at least about 85%, at least about 90%, at least about 95%, or at least about 99% identity to one or more polypeptide(s) selected from SEQ ID NO: 1133, SEQ ID NO: 1134, SEQ ID NO: 1135, SEQ ID NO: 1136 or a functional fragment thereof. In other specific embodiments, the polypeptide consists of one or more polypeptide(s) selected from SEQ ID NO: 1133, SEQ ID NO: 1134, SEQ ID NO: 1135, SEQ ID NO: 1136.

[0535] In some embodiments, the genetically engineered bacteria comprise a gene sequence encoding IL-15, IL-Ralpha, Linker, and IL-15-IL15Ralpha fusion protein, or a fragment or functional variant thereof. In one embodiment, the gene sequence encoding IL-15 or IL-15 fusion protein has at least about 90% identity with a sequence selected from SEQ ID NO: 1338, SEQ ID NO: 1339, SEQ ID NO: 1340, SEQ ID NO: 1341, SEQ ID NO: 1342, SEQ ID NO: 1343, SEQ ID NO: 1344. In one embodiment, the gene sequence encoding IL-15 or IL-15 fusion protein has at least about 80% identity with a sequence selected from SEQ ID NO: 1338, SEQ ID NO: 1339, SEQ ID NO: 1340, SEQ ID NO: 1341, SEQ ID NO: 1342, SEQ ID NO: 1343, SEQ ID NO: 1344. In one embodiment, the gene sequence encoding IL-15 or IL-15 fusion protein has at least about 95% identity with a sequence selected from SEQ ID NO: 1338, SEQ ID NO: 1339, SEQ ID NO: 1340, SEQ ID NO: 1341, SEQ ID NO: 1342, SEQ ID NO: 1343, SEQ ID NO: 1344. In certain embodiments, the IL-15, IL-Ralpha, Linker, and IL-15-IL15Ralpha fusion protein sequence has at least about 80%, 85%, 86%, 87%, 88%, 89%, 90%, 91%, 92%, 93%, 94%, 95%, 96%, 97%, 98%, or 99% identity with one or more polynucleotides selected from SEQ ID NO: 1338, SEQ ID NO: 1339, SEQ ID NO: 1340, SEQ ID NO: 1341, SEQ ID NO: 1342, SEQ ID NO: 1343, SEQ ID NO: 1344 or functional fragments thereof. In some specific embodiments, the gene sequence comprises one or more polynucleotides selected from SEQ ID NO: 1338, SEQ ID NO: 1339, SEQ ID NO: 1340, SEQ ID NO: 1341, SEQ ID NO: 1342, SEQ ID NO: 1343, SEQ ID NO: 1344. In other specific embodiments, the gene sequence consists of one or more polynucleotides selected from SEQ ID NO: 1338, SEQ ID NO: 1339, SEQ ID NO: 1340, SEQ ID NO: 1341, SEQ ID NO: 1342, SEQ ID NO: 1343, SEQ ID NO: 1344.

[0536] In some embodiments, the genetically engineered bacteria comprise a gene sequence encoding IL-15 or IL-15 fusion protein, or a fragment or functional variant thereof. In one embodiment, the gene sequence encoding IL-15 or IL-15 fusion protein has at least about 80% identity with a sequence selected from SEQ ID NO: 1345, SEQ ID NO: 1200, SEQ ID NO: 1201, SEQ ID NO: 1202, SEQ ID NO: 1203, SEQ ID NO: 1204, and SEQ ID NO: 1199. In another embodiment, the gene sequence encoding IL-15 or IL-15 fusion protein has at least about 85% identity with a sequence selected from SEQ ID NO: 1345, SEQ ID NO: 1200, SEQ ID NO: 1201, SEQ ID NO: 1202, SEQ ID NO: 1203, SEQ ID NO: 1204, and SEQ ID NO: 1199. In one embodiment, the gene sequence encoding IL-15 or IL-15 fusion protein has at least about 90% identity with a sequence selected from SEQ ID NO: 1345, SEQ ID NO: 1200, SEQ ID NO: 1201, SEQ ID NO: 1202, SEQ ID NO: 1203, SEQ ID NO: 1204, and SEQ ID NO: 1199. In one embodiment, the gene sequence IL-15 or IL-15 fusion protein has at least about 95% identity with a sequence selected from SEQ ID NO: 1345, SEQ ID NO: 1200, SEQ ID NO: 1201, SEQ ID NO: 1202, SEQ ID NO: 1203, SEQ ID NO: 1204, and SEQ ID NO: 1199. In another embodiment, the gene sequence encoding IL-15 or IL-15 fusion protein has at least about 96%, 97%, 98%, or 99% identity with a sequence selected from SEQ ID NO: 1345, SEQ ID NO: 1200, SEQ ID NO: 1201, SEQ ID NO: 1202, SEQ ID NO: 1203, SEQ ID NO: 1204, and SEQ ID NO: 1199. Accordingly, in one embodiment, the gene sequence encoding IL-15 or IL-15 fusion protein has at least about 80%, 81%, 82%, 83%, 84%, 85%, 86%, 87%, 88%, 89%, 90%, 91%, 92%, 93%, 94%, 95%, 96%, 97%, 98%, or 99% identity with a sequence selected from SEQ ID NO: 1345, SEQ ID NO: 1200, SEQ ID NO: 1201, SEQ ID NO: 1202, SEQ ID NO: 1203, SEQ ID NO: 1204, and SEQ ID NO: 1199. In another embodiment, the gene sequence encoding IL-15 or IL-15 fusion protein comprises a sequence selected from SEQ ID NO: 1345, SEQ ID NO: 1200, SEQ ID NO: 1201, SEQ ID NO: 1202, SEQ ID NO: 1203, SEQ ID NO: 1204, and SEQ ID NO: 1199. In yet another embodiment, the gene sequence encoding IL-15 or IL-15 fusion protein consists of a sequence selected from SEQ ID NO: 1345, SEQ ID NO: 1200, SEQ ID NO: 1201, SEQ ID NO: 1202, SEQ ID NO: 1203, SEQ ID NO: 1204, and SEQ ID NO: 1199. In any of these embodiments wherein the genetically engineered bacteria encode IL-15 or IL-15 fusion protein, one or more of the sequences encoding a Tag are removed.

[0537] In some embodiments, the genetically engineered bacteria comprise a gene sequence encoding a IL-15 or IL-15 fusion protein described herein having at least about 80% identity with a sequence selected from SEQ ID NO: 1195, SEQ ID NO: 1196, SEQ ID NO: 1197, and SEQ ID NO: 1198. In some embodiments, the genetically engineered bacteria comprise a gene sequence encoding a IL-15 or IL-15 fusion protein that has about having at least about 90% identity with a sequence selected from SEQ ID NO: 1195, SEQ ID NO: 1196, SEQ ID NO: 1197, and SEQ ID NO: 1198. In some embodiments, the genetically engineered bacteria comprise a gene sequence encoding a IL-15 or IL-15 fusion protein that has about having at least about 95% identity with a sequence selected from SEQ ID NO: 1195, SEQ ID NO: 1196, SEQ ID NO: 1197, and SEQ ID NO: 1198. In some embodiments, the genetically engineered bacteria comprise a gene sequence encoding a IL-15 or IL-15 fusion protein that has about 80%, 81%, 82%, 83%, 84%, 85%, 86%, 87%, 88%, 89%, 90%, 91%, 92%, 93%, 94%, 95%, 96%, 97%, 98%, or 99% identity to a sequence selected from SEQ ID NO: 1195, SEQ ID NO: 1196, SEQ ID NO: 1197, and SEQ ID NO: 1198, or a functional fragment thereof. In another embodiment, the IL-15 or IL-15 fusion protein comprises a sequence selected from SEQ ID NO: 1195, SEQ ID NO: 1196, SEQ ID NO: 1197, and SEQ ID NO: 1198. In yet another embodiment, the IL-15 or IL-15 fusion protein expressed by the genetically engineered bacteria consists of a sequence selected from SEQ ID NO: 1195, SEQ ID NO: 1196, SEQ ID NO: 1197, and SEQ ID NO: 1198. In any of these embodiments wherein the genetically engineered bacteria encode IL-15 or IL-15 fusion protein, the secretion tag may be removed and replaced by a different secretion tag.

[0538] Interferon gamma (IFNγ or type II interferon), is a cytokine that is critical for innate and adaptive immunity against viral, some bacterial and protozoal infections. IFNγ activates macrophages and induces Class II major histocompatibility complex (MHC) molecule expression. IFNγ can inhibit viral replication and has immunostimulatory and immunomodulatory effects in the immune system. IFNγ is produced predominantly by natural killer (NK) and natural killer T (NKT) cells as part of the innate immune response, and by CD4 Th1 and CD8 cytotoxic T lymphocyte (CTL) effector T cells. Once antigen-specific immunity develops IFNγ is secreted by T helper cells (specifically, Th1 cells), cytotoxic T cells (TC cells) and NK cells only. It has numerous immunostimulatory effects and plays several different roles in the immune system, including the promotion of NK cell activity, increased antigen presentation and lysosome activity of macrophages, activation of inducible Nitric Oxide Synthase iNOS, production of certain IgGs from activated plasma B cells, promotion of Th1 differentiation that leads to cellular immunity. It can also cause normal cells to increase expression of class I MHC molecules as well as class II MHC on antigen-presenting cells, promote adhesion and binding relating to leukocyte migration, and is involved in granuloma formation through the activation of macrophages so that they become more powerful in killing intracellular organisms.

[0539] In any of these embodiments, the genetically engineered bacteria produce at least about 0% to 2% to 4%, 4% to 6%,6% to 8%, 8% to 10%, 10% to 12%, 12% to 14%, 14% to 16%, 16% to 18%, 18% to 20%, 20% to 25%,25% to 30%, 30% to 35%, 35% to 40%,40% to 45% 45% to 50%, 50% to 55%, 55% to 60%, 60% to 65%, 65% to 70% to 80%, 80% to 90%, or 90% to 100% more IFN-gamma than unmodified bacteria of the same bacterial subtype under the same conditions. In yet another embodiment, the genetically engineered bacteria produce at least about 1.0-1.2-fold, 1.2-1.4-fold, 1.4-1.6-fold, 1.6-1.8-fold, 1.8-2-fold, or two-fold more IFN-gamma than unmodified bacteria of the same bacterial subtype under the same conditions. In yet another embodiment, the genetically engineered bacteria produce three-fold, four-fold, five-fold, six-fold, seven-fold, eight-fold, nine-fold, ten-fold, fifteen-fold, twenty-fold, thirty-fold, forty-fold, or fifty-fold, hundred-fold, five hundred-fold, or one-thousand-fold more IFN-gamma than unmodified bacteria of the same bacterial subtype under the same conditions.

[0540] In any of these embodiments, the bacteria genetically engineered to produce IFN-gamma secrete at least about 0% to 2% to 4%, 4% to 6%,6% to 8%, 8% to 10%, 10% to 12%, 12% to 14%, 14% to 16%, 16% to 18%, 18% to 20%, 20% to 25%,25% to 30%, 30% to 35%, 35% to 40%,40% to 45% 45% to 50%, 50% to 55%, 55% to 60%, 60% to 65%, 65% to 70% to 80%, 80% to 90%, or 90% to 100% more IFN-gamma than unmodified bacteria of the same bacterial subtype under the same conditions. In yet another embodiment, the genetically engineered bacteria secrete at least about 1.0-1.2-fold, 1.2-1.4-fold, 1.4-1.6-fold, 1.6-1.8-fold, 1.8-2-fold, or two-fold more IFN-gamma than unmodified bacteria of the same bacterial subtype under the same conditions. In yet another embodiment, the genetically engineered bacteria secrete three-fold, four-fold, five-fold, six-fold, seven-fold, eight-fold, nine-fold, ten-fold, fifteen-fold, twenty-fold, thirty-fold, forty-fold, or fifty-fold, hundred-fold, five hundred-fold, or one-thousand-fold more IFN-gamma than unmodified bacteria of the same bacterial subtype under the same conditions.

[0541] In some embodiments, the bacteria genetically engineered to secrete IFN-gamma are capable of reducing cell proliferation by at least about 10% to 20%, 20% to 25%, 25% to 30%, 30% to 40%, 40% to 50%, 50% to 60%, 60% to 70%, 70% to 75%, 75% to 80%, 80% to 85%, 85% to 90%, 90% to 95%, 95% to 99%, or more as compared to an unmodified bacteria of the same subtype under the same conditions.

[0542] In some embodiments, the genetically engineered bacteria comprising one or more genes encoding IFN-gamma induce STAT1 phosphorylation in macrophage cell lines. In any of these embodiments, the bacteria genetically engineered to produce IFN-gamma induce STAT1 phosphorylation 0% to 2% to 4%, 4% to 6%,6% to 8%, 8% to 10%, 10% to 12%, 12% to 14%, 14% to 16%, 16% to 18%, 18% to 20%, 20% to 25%,25% to 30%, 30% to 35%, 35% to 40%,40% to 45% 45% to 50%, 50% to 55%, 55% to 60%, 60% to 65%, 65% to 70% to 80%, 80% to 90%, or 90% to 100% or greater levels than unmodified bacteria of the same bacterial subtype under the same conditions. In yet another embodiment, the genetically engineered bacteria induce STAT1 phosphorylation 1.0-1.2-fold, 1.2-1.4-fold, 1.4-1.6-fold, 1.6-1.8-fold, 1.8-2-fold, or two-fold or greater levels than unmodified bacteria of the same bacterial subtype under the same conditions. In yet another embodiment, the genetically engineered bacteria induce STAT1 phosphorylation three-fold, four-fold, five-fold, six-fold, seven-fold, eight-fold, nine-fold, ten-fold, fifteen-fold, twenty-fold, thirty-fold, forty-fold, or fifty-fold, hundred-fold, five hundred-fold, or one-thousand-fold or greater levels than unmodified bacteria of the same bacterial subtype under the same conditions.

[0543] In one specific embodiment, the bacteria are capable of increasing IFNgamma production in the tumor by 0.1, 0.2, 0.3 ng per gram of tumor relative to same bacteria unmodified bacteria of the same bacterial subtype under the same conditions. In one specific embodiment, the bacteria are capable of increasing IFNgamma production about 5, 10, or 15 fold relative to same bacteria unmodified bacteria of the same bacterial subtype under the same conditions.

[0544] In some embodiments, the bacteria genetically engineered to secrete IFN-gamma are capable of reducing tumor growth by at least about 10% to 20%, 20% to 25%, 25% to 30%, 30% to 40%, 40% to 50%, 50% to 60%, 60% to 70%, 70% to 75%, 75% to 80%, 80% to 85%, 85% to 90%, 90% to 95%, 95% to 99%, or more as compared to an unmodified bacteria of the same subtype under the same conditions.

[0545] In some embodiments, the bacteria genetically engineered to secrete IFN-gamma are capable of reducing tumor size by at least about 10% to 20%, 20% to 25%, 25% to 30%, 30% to 40%, 40% to 50%, 50% to 60%, 60% to 70%, 70% to 75%, 75% to 80%, 80% to 85%, 85% to 90%, 90% to 95%, 95% to 99%, or more as compared to an unmodified bacteria of the same subtype under the same conditions. In some embodiments, the bacteria genetically engineered to produce IFN-gamma are capable of reducing tumor volume by at least about 10% to 20%, 20% to 25%, 25% to 30%, 30% to 40%, 40% to 50%, 50% to 60%, 60% to 70%, 70% to 75%, 75% to 80%, 80% to 85%, 85% to 90%, 90% to 95%, 95% to 99%, or more as compared to an unmodified bacteria of the same subtype under the same conditions. In some embodiments, the bacteria genetically engineered to produce IFN-gamma are capable of reducing tumor weight by at least about 10% to 20%, 20% to 25%, 25% to 30%, 30% to 40%, 40% to 50%, 50% to 60%, 60% to 70%, 70% to 75%, 75% to 80%, 80% to 85%, 85% to 90%, 90% to 95%, 95% to 99%, or more as compared to an unmodified bacteria of the same subtype under the same conditions. In some embodiments, the bacteria genetically engineered to produce IFN-gamma are capable of increasing the response rate by at least about 10% to 20%, 20% to 25%, 25% to 30%, 30% to 40%, 40% to 50%, 50% to 60%, 60% to 70%, 70% to 75%, 75% to 80%, 80% to 85%, 85% to 90%, 90% to 95%, 95% to 99%, or more as compared to an unmodified bacteria of the same subtype under the same conditions.

[0546] Interleukin-18 (IL-18, also known as interferon-gamma inducing factor) is a proinflammatory cytokine that belongs to the IL-1 superfamily and is produced by macrophages and other cells. IL-18 binds to the interleukin-18 receptor, and together with IL-12 it induces cell-mediated immunity following infection with microbial products like lipopolysaccharide (LPS). Upon stimulation with IL-18, natural killer (NK) cells and certain T helper type 1 cells release interferon-γ (IFN-γ) or type II interferon, which plays a role in activating the macrophages and other immune cells. IL-18 is also able to induce severe inflammatory reactions.

[0547] Thus, in some embodiments, the engineered bacteria is engineered to produce IL-18. In some embodiments, the engineered bacteria comprises sequence to encode IL-18. In some embodiments, the engineered bacteria is engineered to over-express IL-18, for example, operatively linked to a strong promoter and/or comprising more than one copy of the IL-18 gene sequence. In some embodiments, the engineered bacteria comprises sequence(s) encoding two or more copies of IL-18 gene, e.g., two, three, four, five, six or more copies of IL-18 gene. In some embodiments, the genetically engineered bacterium expresses IL-18 and/or expresses secretory peptides under the control of a promoter that is activated by low-oxygen conditions. In some embodiments, the genetically engineered bacterium is a bacterium that expresses IL-18, and/or expresses secretory peptide(s) under the control of a promoter that is activated by low-oxygen conditions. In certain embodiments, the genetically engineered bacteria express IL-18 and/or secretory peptide(s), under the control of a promoter that is activated by hypoxic conditions, or by inflammatory conditions, such as any of the promoters activated by said conditions and described herein. In some embodiments, the genetically engineered bacteria expresses IL-18 and/or expresses secretory peptide(s), under the control of a cancer-specific promoter, a tissue-specific promoter, or a constitutive promoter, such as any of the promoters described herein.

[0548] Interleukin-2 (IL-2) is cytokine that regulates the activities of white blood cells (leukocytes, often lymphocytes). IL-2 is part of the body's natural response to microbial infection, and in discriminating between foreign (“non-self”) and “self”. IL-2 mediates its effects by binding to IL-2 receptors, which are expressed by lymphocytes. IL-2 is a member of a cytokine family, which also includes IL-4, IL-7, IL-9, IL-15 and IL-21. IL-2 signals through the IL-2 receptor, a complex consisting of alpha, beta and gamma sub-units. The gamma sub-unit is shared by all members of this family of cytokine receptors. IL-2 promotes the differentiation of T cells into effector T cells and into memory T cells when the initial T cell is stimulated by an antigen. Through its role in the development of T cell immunologic memory, which depends upon the expansion of the number and function of antigen-selected T cell clones, it also has a key role in cell-mediated immunity. IL-2 has been approved by the Food and Drug Administration (FDA) and in several European countries for the treatment of cancers (malignant melanoma, renal cell cancer). IL-2 is also used to treat melanoma metastases and has a high complete response rate.

[0549] Thus, in some embodiments, the engineered bacteria is engineered to produce IL-2. In some embodiments, the engineered bacteria comprises sequence to encode IL-2. In some embodiments, the engineered bacteria is engineered to over-express IL-2, for example, operatively linked to a strong promoter and/or comprising more than one copy of the IL-2 gene sequence. In some embodiments, the engineered bacteria comprises sequence(s) encoding two or more copies of IL-2 gene, e.g., two, three, four, five, six or more copies of IL-2 gene. In some embodiments, the genetically engineered bacterium expresses IL-2 and/or expresses secretory peptides under the control of a promoter that is activated by low-oxygen conditions. In some embodiments, the genetically engineered bacterium is a bacterium that expresses IL-2, and/or expresses secretory peptide(s) under the control of a promoter that is activated by low-oxygen conditions. In certain embodiments, the genetically engineered bacteria express IL-2 and/or secretory peptide(s), under the control of a promoter that is activated by hypoxic conditions, or by inflammatory conditions, such as any of the promoters activated by said conditions and described herein. In some embodiments, the genetically engineered bacteria expresses IL-2 and/or expresses secretory peptide(s), under the control of a cancer-specific promoter, a tissue-specific promoter, or a constitutive promoter, such as any of the promoters described herein.

[0550] Interleukin-21 is a cytokine that has potent regulatory effects on certain cells of the immune system, including natural killer(NK) cells and cytotoxic T cells. IL-21 induces cell division/proliferation in its these cells. IL-21 is expressed in activated human CD4+ T cells but not in most other tissues. In addition, IL-21 expression is up-regulated in Th2 and Th17 subsets of T helper cells. IL-21 is also expressed in NK T cells regulating the function of these cells. When bound to IL-21, the IL-21 receptor acts through the Jak/STAT pathway, utilizing Jak1 and Jak3 and a STAT3 homodimer to activate its target genes. IL-21 has been shown to modulate the differentiation programming of human T cells by enriching for a population of memory-type CTL with a unique CD28+CD127hi CD45RO+ phenotype with IL-2 producing capacity. IL-21 also has anti-tumor effects through continued and increased CD8+ cell response to achieve enduring tumor immunity. IL-21 has been approved for Phase 1 clinical trials in metastatic melanoma (MM) and renal cell carcinoma (RCC) patients.

[0551] Thus, in some embodiments, the engineered bacteria is engineered to produce IL-21. In some embodiments, the engineered bacteria comprises sequence that encodes IL-21. In some embodiments, the engineered bacteria is engineered to over-express IL-21, for example, operatively linked to a strong promoter and/or comprising more than one copy of the IL-21 gene sequence. In some embodiments, the engineered bacteria comprises sequence(s) encoding two or more copies of IL-21, e.g., two, three, four, five, six or more copies of IL-21 gene. In some embodiments, the engineered bacteria produce one or more immune modulators that stimulate the production of IL-21. In some embodiments, the engineered bacteria comprises sequence to encode IL-21 and sequence to encode a secretory peptide(s) for the secretion of 11-21. In some embodiments, the genetically engineered bacterium expresses IL-21 and/or expresses secretory peptides under the control of a promoter that is activated by low-oxygen conditions. In some embodiments, the genetically engineered bacterium is a bacterium that expresses 11-21, and/or expresses secretory peptide(s) under the control of a promoter that is activated by low-oxygen conditions. In certain embodiments, the genetically engineered bacteria express IL-21 and/or secretory peptide(s), under the control of a promoter that is activated by hypoxic conditions, or by inflammatory conditions, such as any of the promoters activated by said conditions and described herein. In some embodiments, the genetically engineered bacteria expresses IL-21 and/or expresses secretory peptide(s), under the control of a cancer-specific promoter, a tissue-specific promoter, or a constitutive promoter, such as any of the promoters described herein.

[0552] Tumor necrosis factor (TNF) (also known as cachectin or TNF alpha) is a cytokine that can cause cytolysis of certain tumor cell lines and can stimulate cell proliferation and induce cell differentiation under certain conditions. TNF is involved in systemic inflammation and is one of the cytokines that make up the acute phase reaction. It is produced chiefly by activated macrophages, although it can be produced by many other cell types such as CD4+ lymphocytes, NK cells, neutrophils, mast cells, eosinophils, and neurons. The primary role of TNF is in the regulation of immune cells.

[0553] TNF can bind two receptors, TNFR1 (TNF receptor type 1; CD120a; p55/60) and TNFR2 (TNF receptor type 2; CD120b; p75/80). TNFR1 is expressed in most tissues, and can be fully activated by both the membrane-bound and soluble trimeric forms of TNF, whereas TNFR2 is found only in cells of the immune system, and respond to the membrane-bound form of the TNF homotrimer. Upon binding to its receptor, TNF can activate NF-κB and MAPK pathways which mediate the transcription of numerous proteins and mediate several pathways involved in cell differentiation and proliferation, including those pathways involved in the inflammatory response. TNF also regulates pathways that induce cell apoptosis.

[0554] In some embodiments, the genetically engineered bacteria are capable of producing an immune modulator that modulates dendritic cell activation. In some embodiments, the immune modulator is TNF. Thus, in some embodiments, the engineered bacteria is engineered to produce TNF. IN some embodiments, TNF is secreted from the bacterium, as described herein. In some embodiments, the engineered bacteria comprises sequence that encodes TNF.

[0555] In any of these embodiments, the genetically engineered bacteria produce at least about 0% to 2% to 4%, 4% to 6%,6% to 8%, 8% to 10%, 10% to 12%, 12% to 14%, 14% to 16%, 16% to 18%, 18% to 20%, 20% to 25%,25% to 30%, 30% to 35%, 35% to 40%,40% to 45% 45% to 50%, 50% to 55%, 55% to 60%, 60% to 65%, 65% to 70% to 80%, 80% to 90%, or 90% to 100% more TNF than unmodified bacteria of the same bacterial subtype under the same conditions. In yet another embodiment, the genetically engineered bacteria produce at least about 1.0-1.2-fold, 1.2-1.4-fold, 1.4-1.6-fold, 1.6-1.8-fold, 1.8-2-fold, or two-fold more TNF than unmodified bacteria of the same bacterial subtype under the same conditions. In yet another embodiment, the genetically engineered bacteria produce three-fold, four-fold, five-fold, six-fold, seven-fold, eight-fold, nine-fold, ten-fold, fifteen-fold, twenty-fold, thirty-fold, forty-fold, or fifty-fold, hundred-fold, five hundred-fold, or one-thousand-fold more TNF than unmodified bacteria of the same bacterial subtype under the same conditions.

[0556] In any of these embodiments, the bacteria genetically engineered to produce TNF secrete at least about 0% to 2% to 4%, 4% to 6%,6% to 8%, 8% to 10%, 10% to 12%, 12% to 14%, 14% to 16%, 16% to 18%, 18% to 20%, 20% to 25%,25% to 30%, 30% to 35%, 35% to 40%,40% to 45% 45% to 50%, 50% to 55%, 55% to 60%, 60% to 65%, 65% to 70% to 80%, 80% to 90%, or 90% to 100% more TNF than unmodified bacteria of the same bacterial subtype under the same conditions. In yet another embodiment, the genetically engineered bacteria secrete at least about 1.0-1.2-fold, 1.2-1.4-fold, 1.4-1.6-fold, 1.6-1.8-fold, 1.8-2-fold, or two-fold more TNF than unmodified bacteria of the same bacterial subtype under the same conditions. In yet another embodiment, the genetically engineered bacteria secrete three-fold, four-fold, five-fold, six-fold, seven-fold, eight-fold, nine-fold, ten-fold, fifteen-fold, twenty-fold, thirty-fold, forty-fold, or fifty-fold, hundred-fold, five hundred-fold, or one-thousand-fold more TNF than unmodified bacteria of the same bacterial subtype under the same conditions.

[0557] In some embodiments, the bacteria genetically engineered to secrete TNF are capable of reducing cell proliferation by at least about 10% to 20%, 20% to 25%, 25% to 30%, 30% to 40%, 40% to 50%, 50% to 60%, 60% to 70%, 70% to 75%, 75% to 80%, 80% to 85%, 85% to 90%, 90% to 95%, 95% to 99%, or more as compared to an unmodified bacteria of the same subtype under the same conditions. In some embodiments, the bacteria genetically engineered to secrete TNF are capable of reducing tumor growth by at least about 10% to 20%, 20% to 25%, 25% to 30%, 30% to 40%, 40% to 50%, 50% to 60%, 60% to 70%, 70% to 75%, 75% to 80%, 80% to 85%, 85% to 90%, 90% to 95%, 95% to 99%, or more as compared to an unmodified bacteria of the same subtype under the same conditions. In some embodiments, the bacteria genetically engineered to secrete TNF are capable of reducing tumor size by at least about 10% to 20%, 20% to 25%, 25% to 30%, 30% to 40%, 40% to 50%, 50% to 60%, 60% to 70%, 70% to 75%, 75% to 80%, 80% to 85%, 85% to 90%, 90% to 95%, 95% to 99%, or more as compared to an unmodified bacteria of the same subtype under the same conditions. In some embodiments, the bacteria genetically engineered to produce TNF are capable of reducing tumor volume by at least about 10% to 20%, 20% to 25%, 25% to 30%, 30% to 40%, 40% to 50%, 50% to 60%, 60% to 70%, 70% to 75%, 75% to 80%, 80% to 85%, 85% to 90%, 90% to 95%, 95% to 99%, or more as compared to an unmodified bacteria of the same subtype under the same conditions. In one embodiment, the genetically engineered bacteria are capable of reducing tumor volume by about 40-60%, by about 45-55%, e.g., on day 7 of a two dose treatment regimen. In one embodiment, tumor volume is about 300 mm3 upon administration of the bacteria expressing TNF, relative to about 600 mm3 upon administration of unmodified bacteria of the same subtype under the same conditions. In some embodiments, the bacteria genetically engineered to produce TNF are capable of reducing tumor weight by at least about 10% to 20%, 20% to 25%, 25% to 30%, 30% to 40%, 40% to 50%, 50% to 60%, 60% to 70%, 70% to 75%, 75% to 80%, 80% to 85%, 85% to 90%, 90% to 95%, 95% to 99%, or more as compared to an unmodified bacteria of the same subtype under the same conditions. In some embodiments, the bacteria genetically engineered to produce TNF are capable of increasing the response rate by at least about 10% to 20%, 20% to 25%, 25% to 30%, 30% to 40%, 40% to 50%, 50% to 60%, 60% to 70%, 70% to 75%, 75% to 80%, 80% to 85%, 85% to 90%, 90% to 95%, 95% to 99%, or more as compared to an unmodified bacteria of the same subtype under the same conditions.

[0558] In some embodiments, the bacteria genetically engineered to produce TNF are capable of increasing CCR7 expression on dendritic cells and/or macrophages.

[0559] In some embodiments, the genetically engineered bacteria comprising one or more genes encoding TNFα for secretion are capable of activating the NFkappaB pathway, e.g., in cells with TNF receptor. In some embodiments, the genetically engineered bacteria comprising one or more genes encoding TNFα are capable of inducing IkappaBalpha degradation. In some embodiments, secreted TNFα levels secreted from the engineered bacteria causes IkappaBalpha degradation to about the same extent as recombinant TNFα at the same concentration under the same conditions.

[0560] In some embodiments, the genetically engineered microorganisms are capable of expressing any one or more of the described IL-2, IL-15, IL-12, IL-7, IL-21, IL-18, TNF, and IFN-gamma circuits in low-oxygen conditions, and/or in the presence of cancer and/or in the tumor microenvironment, or tissue specific molecules or metabolites, and/or in the presence of molecules or metabolites associated with inflammation or immune suppression, and/or in the presence of metabolites that may be present in the gut, and/or in the presence of metabolites that may or may not be present in vivo, and may be present in vitro during strain culture, expansion, production and/or manufacture, such as arabinose, cumate, and salicylate and others described herein. In some embodiments such an inducer may be administered in vivo to induce effector gene expression. In some embodiments, the gene sequences(s) encoding IL-2, IL-15, IL-12, IL-7, IL-21, IL-18, TNF, and IFN-gamma are controlled by a promoter inducible by such conditions and/or inducers. In some embodiments, the gene sequences(s) encoding IL-2, IL-15, IL-12, IL-7, IL-21, IL-18, TNF, and IFN-gamma are controlled by a constitutive promoter, as described herein. In some embodiments, the gene sequences(s) are controlled by a constitutive promoter, and are expressed in in vivo conditions and/or in vitro conditions, e.g., during expansion, production and/or manufacture, as described herein. In some embodiments, any one or more of the described genes sequences encoding IL-2, IL-15, IL-12, IL-7, IL-21, IL-18, TNF, and/or IFN-gamma are present on one or more plasmids (e.g., high copy or low copy) or are integrated into one or more sites in the microorganismal chromosome.

[0561] In any of these embodiments, the genetically engineered bacteria comprising gene sequence(s) encoding IL-2, IL-15, IL-12, IL-7, IL-21, IL-18, TNF, and/or IFN-gamma further comprise gene sequence(s) encoding one or more further effector molecule(s), i.e., therapeutic molecule(s) or a metabolic converter(s). In any of these embodiments, the circuit encoding IL-2, IL-15, IL-12, IL-7, IL-21, IL-18, TNF, and/or IFN-gamma may be combined with a circuit encoding one or more immune initiators or immune sustainers as described herein, in the same or a different bacterial strain (combination circuit or mixture of strains). The circuit encoding the immune initiators or immune sustainers may be under the control of a constitutive or inducible promoter, e.g., low oxygen inducible promoter or any other constitutive or inducible promoter described herein.

[0562] In any of these embodiments, the gene sequence(s) encoding IL-2, IL-15, IL-12, IL-7, IL-21, IL-18, TNF, and/or IFN-gamma may be combined with gene sequence(s) encoding one or more STING agonist producing enzymes, as described herein, in the same or a different bacterial strain (combination circuit or mixture of strains). In some embodiments, the gene sequences which are combined with the gene sequence(s) encoding IL-2, IL-15, IL-12, IL-7, IL-21, IL-18, TNF, and/or IFN-gamma encode DacA. DacA may be under the control of a constitutive or inducible promoter, e.g., low oxygen inducible promoter such as FNR or any other constitutive or inducible promoter described herein. In some embodiments, the dacA gene is integrated into the chromosome. In some embodiments, the gene sequences which are combined with the gene sequence(s) encoding IL-2, IL-15, IL-12, IL-7, IL-21, IL-18, TNF, and/or IFN-gamma comprise cGAS. cGAS may be under the control of a constitutive or inducible promoter, e.g., low oxygen inducible promoter such as FNR or any other constitutive or inducible promoter described herein. In some embodiments, the gene encoding cGAS is integrated into the chromosome.

[0563] In any of these combination embodiments, the bacteria may further comprise an auxotrophic modification, e.g., a mutation or deletion in DapA, ThyA, or both. In any of these embodiments, the bacteria may further comprise a phage modification, e.g., a mutation or deletion, in an endogenous prophage as described herein.

[0564] Also, in some embodiments, the genetically engineered microorganisms are capable of expressing any one or more of the described circuits encoding IL-2, IL-15, IL-12, IL-7, IL-21, IL-18, TNF, and IFN-gamma and further comprise one or more of the following: (1) one or more auxotrophies, such as any auxotrophies known in the art and provided herein, e.g., thyA auxotrophy, (2) one or more kill switch circuits, such as any of the kill-switches described herein or otherwise known in the art, (3) one or more antibiotic resistance circuits, (4) one or more transporters for importing biological molecules or substrates, such any of the transporters described herein or otherwise known in the art, (5) one or more secretion circuits, such as any of the secretion circuits described herein and otherwise known in the art, (6) one or more surface display circuits, such as any of the surface display circuits described herein and otherwise known in the art and (7) one or more circuits for the production or degradation of one or more metabolites (e.g., kynurenine, tryptophan, adenosine, arginine) described herein (8) combinations of one or more of such additional circuits. In any of these embodiments, the genetically engineered bacteria may be administered alone or in combination with one or more immune checkpoint inhibitors described herein, including but not limited anti-CTLA4, anti-PD1, or anti-PD-L1 antibodies.

### Co-Stimulatory Molecules

[0565] Glucocorticoid-induced tumour necrosis factor receptor (TNFR)-related receptor (GITR, TNFR18) is a type I transmembrane protein and a member of the TNFR superfamily.1 GITR is expressed at high levels, predominantly, on CD25+CD4+ regulatory T (Treg) cells, but it is also constitutively expressed at low levels on conventional CD25− CD4+ and CD8+ T cells and is rapidly upregulated after activation. In vitro studies using an agonistic anti-GITR monoclonal antibody (mAb; DTA-1)2,6,7 or GITRL transfectants and soluble GITRL5,8,9 have shown that the GITR-GITRL pathway induces positive costimulatory signals leading to the activation of CD4+ and CD8+ effector T cells (as well as Treg cells, despite their opposing effector functions) (Piao et al., (2009) Enhancement of T-cell-mediated anti-tumour immunity via the ectopically expressed glucocorticoid-induced tumour necrosis factor receptor-related receptor ligand (GITRL) on tumours; Immunology, 127, 489-499, and references therein). In some embodiments, the effector or immune modulator, is an agonist of GITR, for example, an agonist selected from agonistic anti-GITR antibody, agonistic anti-GITR antibody fragment, GITR ligand polypeptide (GITRL), and GITRL polypeptide fragment. Thus, in some embodiments, the genetically engineered bacteria comprise sequence(s) encoding an agonistic anti-GITR antibody or fragment thereof, or a GITR ligand polypeptide or fragment thereof. Thus, in some embodiments, the engineered bacteria is engineered to produce an agonistic anti-GITR antibody or fragment thereof, or a GITR ligand polypeptide or fragment thereof. In some embodiments, the engineered bacteria comprises sequence to encode an agonistic anti-GITR antibody or fragment thereof, or a GITR ligand polypeptide or fragment thereof. In some embodiments, the engineered bacteria comprises sequence(s) to encode an agonistic anti-GITR antibody or fragment thereof, or a GITR ligand polypeptide or fragment thereof, and sequence to encode a secretory peptide(s) for the secretion of said antibodies and polypeptides. Non-limiting examples of secretion tags and suitable secretion mechanisms are described herein. In some embodiments, the antibody or ligand is displayed on the surface. Suitable techniques for bacterial surface display are described herein.

[0566] As GITR functions to promote T-cell proliferation and T-cell survival in activated T cells, GITR agonism may be advantageously combined with a second modality capable of initiating a T cell response (immune initiator), including but not limited to genetically engineered bacteria expressing a innate immune stimulator, such as a STING agonist, as described herein.

[0567] Accordingly, in one non-limiting example, one or more genetically engineered bacteria express one or more enzymes for the production of a STING agonist e.g., as described herein in combination with an agonistic anti-GITR antibody. In another non-limiting example, one or more genetically engineered bacteria express one or more enzymes for the production of a STING agonist e.g., as described herein are administered in combination with agonistic anti-GITR antibody, as described herein.

[0568] CD137 or 4-1BB is a type 2 transmembrane glycoprotein belonging to the TNF superfamily, which is expressed and has a co-stimulatory activity on activated T Lymphocytes (e.g., CD8+ and CD4+ cells). It has been shown to enhance T cell proliferation, IL-2 secretion survival and cytolytic activity. In some embodiments, the immune modulator is an agonist of CD137 (4-1BB), for example, an agonist selected from an agonistic anti-CD137 antibody or fragment thereof, or a CD137 ligand polypeptide or fragment thereof. Thus, in some embodiments, the genetically engineered bacteria comprise sequence(s) encoding an agonistic anti-CD137 antibody or fragment thereof, or a CD137 ligand polypeptide or fragment thereof. Thus, in some embodiments, the engineered bacteria is engineered to produce an agonistic anti-CD137 antibody or fragment thereof, or a CD137 ligand polypeptide or fragment thereof.

[0569] In some embodiments, the engineered bacteria comprises sequence to encode an agonistic anti-CD137 antibody or fragment thereof, or a CD137 ligand polypeptide or fragment thereof. In some embodiments, the genetically engineered bacterium expresses an agonistic anti-CD137 antibody or fragment thereof, or a CD137 ligand polypeptide or fragment thereof, and/or expresses secretory peptide(s). Non-limiting examples of suitable secretion tags and suitable secretory mechanisms are described herein. In some embodiments, the antibody or ligand is displayed on the surface. Suitable techniques for bacterial surface display are described herein.

[0570] CD137 (4-1BB) is expressed on activated mouse and human CD8+ and CD4+ T cells.7 It is a member of the TNFR family and mediates costimulatory and antiapoptotic functions, promoting T-cell proliferation and T-cell survival.10,11 CD137 has been reported to be up-regulated—depending on the T-cell stimulus—from 12 hours to up to 5 days after stimulation (Wolff et al., Activation-induced expression of CD137 permits detection, isolation, and expansion of the full repertoire of CD8 T cells responding to antigen without requiring knowledge of epitope specificities; BLOOD, 1 Jul. 2007 VOL. 110, NUMBER 1, and references therein). Accordingly CD137 (4-1BB) agonism may be advantageously combined with a second modality capable of initiating a T cell response (immune initiator), including but not limited to genetically engineered bacteria expressing a innate immune stimulator (immune initiator). Exemplary bacteria expressing a innate immune stimulator (immune initiator) are described herein.

[0571] Accordingly, in one non-limiting example, one or more genetically engineered bacteria express one or more enzymes for the production of a STING agonist e.g., as described herein in combination with an agonistic anti-41BB (CD137) antibody. In another non-limiting example, one or more genetically engineered bacteria express one or more enzymes for the production of a STING agonist e.g., as described herein are administered in combination with agonistic anti-41BB (CD137) antibody, as described herein.

[0572] OX40, or CD134, is a T-cell receptor involved in preserving the survival of T cells and subsequently increasing cytokine production. OX40 has a critical role in the maintenance of an immune response and a memory response due to its ability to enhance survival. It also plays a significant role in both Th1 and Th2 mediated reactions. In some embodiments, the immune modulator is an agonist of OX40, for example, an agonist selected from an agonistic anti-OX40 antibody or fragment thereof, or an OX40 ligand (OX40L) or fragment thereof. Thus, in some embodiments, the genetically engineered bacteria comprise sequence(s) encoding an agonistic anti-OX40 antibody or fragment thereof, or an OX40 ligand or fragment thereof. Thus, in some embodiments, the engineered bacteria is engineered to produce an agonistic anti-OX40 antibody or fragment thereof, or an OX40 ligand or fragment thereof. In some embodiments, the engineered bacteria comprises sequence to encode an agonistic anti-OX40 antibody or fragment thereof, or an OX40 ligand or fragment thereof. In some embodiments, the engineered bacteria comprises sequence(s) to encode an agonistic anti-OX40 antibody or fragment thereof, or an OX40 ligand or fragment thereof and sequence to encode a secretory peptide(s) for the secretion of said antibodies and polypeptides. Non-limiting examples of suitable secretion tags and suitable secretory mechanisms are described herein. In some embodiments, the antibody or ligand is displayed on the surface. Suitable techniques for bacterial surface display are described herein.

[0573] Recently, the combination of unmethylated CG-enriched oligodeoxynucleotide (CpG)-a Toll-like receptor 9 (TLR9) ligand- and anti-OX40 antibody injected locally into one site of a tumor was found to synergistically trigger a T cell immune response locally that then attacks cancer throughout the body at distal sites (Sagiv-Barfi et al., Eradication of spontaneous malignancy by local immunotherapy; Sci. Transl. Med. 10, eaan4488 (2018)). Unmethylated CG-enriched oligodeoxynucleotides (CpG) activate TLR9, a component of the innate immune system. Accordingly other mechanisms of activation the immune system may produce similar results in combination with an agonistic OX40 antibody, including but not limited to genetically engineered bacteria expressing a innate immune stimulator (immune initiator). Exemplary bacteria expressing a innate immune stimulator (immune initiator) are described herein.

[0574] Accordingly, in one non-limiting example, one or more genetically engineered bacteria express one or more enzymes for the production of a STING agonist e.g., as described herein in combination with an agonistic OX40 antibody. In another non-limiting example, one or more genetically engineered bacteria express one or more enzymes for the production of a STING agonist e.g., as described herein are administered in combination with an OX40 antibody, as described herein.

[0575] CD28 is one of the proteins expressed on T cells that provide co-stimulatory signals required for T cell activation and survival. In some embodiments, the immune modulator is an agonist of CD28, for example, an agonist selected from agonistic anti-CD28 antibody, agonistic anti-CD28 antibody fragment, CD80 (B7.1) polypeptide or polypeptide fragment thereof, and CD86 (B7.2) polypeptide or polypeptide fragment thereof. Thus, in some embodiments, the genetically engineered bacteria comprise sequence(s) encoding an agonistic anti-CD28 antibody or a fragment thereof, or a CD80 polypeptide or a fragment thereof, or a CD86 polypeptide or a fragment thereof. In some embodiments, the engineered bacteria is engineered to produce an agonistic anti-CD28 antibody or a fragment thereof, or a CD80 polypeptide or a fragment thereof, or a CD86 polypeptide or a fragment thereof. In some embodiments, the engineered bacteria comprises sequence to encode an agonistic anti-CD28 antibody or a fragment thereof, or a CD80 polypeptide or a fragment thereof, or a CD86 polypeptide or a fragment thereof. In some embodiments, the engineered bacteria comprises sequence(s) to encode an agonistic anti-CD28 antibody or a fragment thereof, or a CD80 polypeptide or a fragment thereof, or a CD86 polypeptide or a fragment thereof and sequence to encode a secretory peptide(s) for the secretion of said antibodies and polypeptides. Non-limiting examples of suitable secretion tags and suitable secretory mechanisms are described herein. In some embodiments, the antibody or ligand is displayed on the surface. Suitable techniques for bacterial surface display are described herein.

[0576] ICOS is an inducible T-cell co-stimulator structurally and functionally related to CD28. In some embodiments, the immune modulator is an agonist of ICOS, for example, an agonist selected from an agonistic anti-ICOS antibody or fragment thereof, or ICOS ligand polypeptide or fragment thereof. Thus, in some embodiments, the genetically engineered bacteria comprise sequence(s) encoding an agonistic anti-ICOS antibody or fragment thereof, or ICOS ligand polypeptide or fragment thereof. Thus, in some embodiments, the engineered bacteria is engineered to produce an agonistic anti-ICOS antibody or fragment thereof, or ICOS ligand polypeptide or fragment thereof. In some embodiments, the engineered bacteria comprises sequence to encode an agonistic anti-ICOS antibody or fragment thereof, or ICOS ligand polypeptide or fragment thereof. In some embodiments, the engineered bacteria comprises sequence(s) to encode an agonistic anti-ICOS antibody or fragment thereof, or ICOS ligand polypeptide or fragment thereof and sequence to encode a secretory peptide(s) for the secretion of said antibodies and polypeptides. Non-limiting examples of suitable secretion tags and suitable secretory mechanisms are described herein. In some embodiments, the antibody or ligand is displayed on the surface. Suitable techniques for bacterial surface display are described herein.

[0577] CD226 is a glycoprotein expressed on the surface of natural killer cells, platelets, monocytes, and a subset of T cells (e.g., CD8+ and CD4+ cells), which mediates cellular adhesion to other cells bearing its ligands, CD112 and CD155. Among other things, it is involved in immune synapse formation and triggers Natural Killer (NK) cell activation. In some embodiments, the immune modulator is an agonist of CD226, for example, an agonist selected from agonistic anti-CD226 antibody or fragment thereof, CD112 or CD155 polypeptide or fragments thereof. Thus, in some embodiments, the genetically engineered bacteria comprise sequence(s) encoding an agonist selected from agonistic anti-CD226 antibody or fragment thereof, CD112 or CD155 polypeptide or fragments thereof. Thus, in some embodiments, the engineered bacteria is engineered to produce an agonist selected from agonistic anti-CD226 antibody or fragment thereof, CD112 or CD155 polypeptide or fragments thereof. In some embodiments, the engineered bacteria comprises sequence to encode an agonist selected from agonistic anti-CD226 antibody or fragment thereof, CD112 or CD155 polypeptide or fragments thereof. In some embodiments, the engineered bacteria comprises sequence(s) to encode an agonist selected from agonistic anti-CD226 antibody or fragment thereof, CD112 or CD155 polypeptide or fragments thereof and sequence to encode a secretory peptide(s) for the secretion of said antibodies and polypeptides. Non-limiting examples of suitable secretion tags and suitable secretory mechanisms are described herein. In some embodiments, the antibody or ligand is displayed on the surface. Suitable techniques for bacterial surface display are described herein.

[0578] In any of these embodiments, the agonistic antibody may be a human antibody or humanized antibody and may comprise different isotypes, e.g., human IgG1, IgG2, IgG3 and IgG4's. Also, the antibody may comprise a constant region that is modified to increase or decrease an effector function such as FcR binding, FcRn binding, complement function, glycosylation, C1q binding; complement dependent cytotoxicity (CDC); Fc receptor binding; antibody-dependent cell-mediated cytotoxicity (ADCC); phagocytosis; down-regulation of cell surface receptors (e.g. B cell receptor; BCR). In any of these embodiments, the antibody may be a single chain antibody or a single chain antibody fragment.

[0579] In some embodiments, the genetically engineered microorganisms are capable of expressing any one or more of the described agonistic anti-GITR antibody/GITR ligand, anti-CD137/CD137 ligand, anti-OX40 antibody/OX40 ligand, anti-CD28 antibody/CD80 or CD86 polypeptides, anti-ICOS antibody/ICOS ligand, anti-CD226 antibody/CD112 and/or CD155 circuits in low-oxygen conditions, and/or in the presence of cancer and/or in the tumor microenvironment, or tissue specific molecules or metabolites, and/or in the presence of molecules or metabolites associated with inflammation or immune suppression, and/or in the presence of metabolites that may be present in the gut, and/or in the presence of metabolites that may or may not be present in vivo, and may be present in vitro during strain culture, expansion, production and/or manufacture, such as arabinose, cumate, and salicylate and others described herein. In some embodiments such an inducer may be administered in vivo to induce effector gene expression. In some embodiments, the gene sequences(s) encoding agonistic anti-GITR antibody/GITR ligand, anti-CD137/CD137 ligand, anti-OX40 antibody/OX40 ligand, anti-CD28 antibody/CD80 or CD86 polypeptides, anti-ICOS antibody/ICOS ligand, anti-CD226 antibody/CD112 and/or CD155 polypeptides are controlled by a promoter inducible by such conditions and/or inducers. In some embodiments, the gene sequences(s) encoding agonistic anti-GITR antibody/GITR ligand, anti-CD137/CD137 ligand, anti-OX40 antibody/OX40 ligand, anti-CD28 antibody/CD80 or CD86 polypeptides, anti-ICOS antibody/ICOS ligand, anti-CD226 antibody/CD112 and/or CD155 polypeptides are controlled by a constitutive promoter, as described herein. In some embodiments, the gene sequences(s) are controlled by a constitutive promoter, and are expressed in in vivo conditions and/or in vitro conditions, e.g., during expansion, production and/or manufacture, as described herein. In some embodiments, any one or more of the described genes sequences encoding agonistic anti-GITR antibody/GITR ligand, anti-CD137/CD137 ligand, anti-OX40 antibody/OX40 ligand, anti-CD28 antibody/CD80 or CD86 polypeptides, anti-ICOS antibody/ICOS ligand, anti-CD226 antibody/CD112 and/or CD155 polypeptides are present on one or more plasmids (e.g., high copy or low copy) or are integrated into one or more sites in the microorganismal chromosome.

[0580] In any of these embodiments, the genetically engineered bacteria comprising gene sequence(s) encoding agonistic anti-GITR antibody/GITR ligand, anti-CD137/CD137 ligand, anti-OX40 antibody/OX40 ligand, anti-CD28 antibody/CD80 or CD86 polypeptides, anti-ICOS antibody/ICOS ligand, anti-CD226 antibody/CD112 and/or CD155 polypeptides further comprise gene sequence(s) encoding one or more further effector molecule(s), i.e., therapeutic molecule(s) or a metabolic converter(s). In any of these embodiments, the circuit encoding agonistic anti-GITR antibody/GITR ligand, anti-CD137/CD137 ligand, anti-OX40 antibody/OX40 ligand, anti-CD28 antibody/CD80 or CD86 polypeptides, anti-ICOS antibody/ICOS ligand, anti-CD226 antibody/CD112 and/or CD155 polypeptides may be combined with a circuit encoding one or more immune initiators or immune sustainers as described herein, in the same or a different bacterial strain (combination circuit or mixture of strains). The circuit encoding the immune initiators or immune sustainers may be under the control of a constitutive or inducible promoter, e.g., low oxygen inducible promoter or any other constitutive or inducible promoter described herein.

[0581] In any of these embodiments, the gene sequence(s) encoding agonistic anti-GITR antibody/GITR ligand, anti-CD137/CD137 ligand, anti-OX40 antibody/OX40 ligand, anti-CD28 antibody/CD80 or CD86 polypeptides, anti-ICOS antibody/ICOS ligand, anti-CD226 antibody/CD112 and/or CD155 polypeptides may be combined with gene sequence(s) encoding one or more STING agonist producing enzymes, as described herein, in the same or a different bacterial strain (combination circuit or mixture of strains). In some embodiments, the gene sequences which are combined with the gene sequence(s) encoding agonistic anti-GITR antibody/GITR ligand, anti-CD137/CD137 ligand, anti-OX40 antibody/OX40 ligand, anti-CD28 antibody/CD80 or CD86 polypeptides, anti-ICOS antibody/ICOS ligand, anti-CD226 antibody/CD112 and/or CD155 polypeptides encode DacA. DacA may be under the control of a constitutive or inducible promoter, e.g., low oxygen inducible promoter such as FNR or any other constitutive or inducible promoter described herein. In some embodiments, the dacA gene is integrated into the chromosome. In some embodiments, the gene sequences which are combined with the gene sequence(s) encoding agonistic anti-GITR antibody/GITR ligand, anti-CD137/CD137 ligand, anti-OX40 antibody/OX40 ligand, anti-CD28 antibody/CD80 or CD86 polypeptides, anti-ICOS antibody/ICOS ligand, anti-CD226 antibody/CD112 and/or CD155 polypeptides encode cGAS. cGAS may be under the control of a constitutive or inducible promoter, e.g., low oxygen inducible promoter such as FNR or any other constitutive or inducible promoter described herein. In some embodiments, the gene encoding cGAS is integrated into the chromosome.

[0582] In any of these combination embodiments, the bacteria may further comprise an auxotrophic modification, e.g., a mutation or deletion in DapA, ThyA, or both. In any of these embodiments, the bacteria may further comprise a phage modification, e.g., a mutation or deletion, in an endogenous prophage as described herein.

[0583] Also, in some embodiments, the genetically engineered microorganisms are capable of expressing any one or more of the described circuits encoding agonistic anti-GITR antibody/GITR ligand, anti-CD137/CD137 ligand, anti-OX40 antibody/OX40 ligand, anti-CD28 antibody/CD80 or CD86 polypeptides, anti-ICOS antibody/ICOS ligand, anti-CD226 antibody/CD112 and/or CD155 polypeptides and further comprise one or more of the following: (1) one or more auxotrophies, such as any auxotrophies known in the art and provided herein, e.g., thyA auxotrophy, (2) one or more kill switch circuits, such as any of the kill-switches described herein or otherwise known in the art, (3) one or more antibiotic resistance circuits, (4) one or more transporters for importing biological molecules or substrates, such any of the transporters described herein or otherwise known in the art, (5) one or more secretion circuits, such as any of the secretion circuits described herein and otherwise known in the art, (6) one or more surface display circuits, such as any of the surface display circuits described herein and otherwise known in the art and (7) one or more circuits for the production or degradation of one or more metabolites (e.g., kynurenine, tryptophan, adenosine, arginine) described herein (8) combinations of one or more of such additional circuits. In any of these embodiments, the genetically engineered bacteria may be administered alone or in combination with one or more immune checkpoint inhibitors described herein, including but not limited anti-CTLA4, anti-PD1, or anti-PD-L1 antibodies.

### Elimination (Reversal) of Local Immune Suppression

[0584] Tumor cells often escape destruction by producing signals that interfere with antigen presentation or maturation of dendritic cells, causing their precursors to mature into immunosuppressive cell types instead. Therefore, the local delivery of one or more immune modulators that prevent or inhibit the activities of immunomodulatory molecules involved in initiating, promoting and/or maintaining immunosuppression at the tumor site, alone or in combination with one or more other immune modulators, provides a therapeutic benefit.

### Immune Checkpoint Inhibitors

[0585] In some embodiments, the immune modulator is an inhibitor of an immune suppressor molecule, for example, an inhibitor of an immune checkpoint molecule. The immune checkpoint molecule to be inhibited can be any known or later discovered immune checkpoint molecule or other immune suppressor molecule. In some embodiments, the immune checkpoint molecule, or other immune suppressor molecule, to be inhibited is selected from CTLA-4, PD-1, PD-L1, PD-L2, TIGIT, VISTA, LAG-3, TIM1, TIM3, CEACAM1, LAIR-1, HVEM, BTLA, CD160, CD200, CD200R, CD39, CD73, B7-H3, B7-H4, IDO, TDO, KIR, and A2aR. In certain aspects, the present disclosure provides an engineered microorganism, e.g., engineered bacteria, that is engineered to produce one or more immune modulators that inhibit an immune checkpoint or other immune suppressor molecule. In some embodiments, the genetically engineered microorganisms are capable of reducing cancerous cell proliferation, tumor growth, and/or tumor volume. In some embodiments, the genetically engineered bacterium is bacterium that has been engineered to target a cancer or tumor cell. In some embodiments, the genetically engineered microorganism is a bacterium that expresses an immune checkpoint inhibitor, or inhibitor of another immune suppressor molecule, under the control of a promoter that is activated by low-oxygen conditions, e.g., the low-oxygen environment of a tumor. In some embodiments, the genetically engineered bacterium express one or more immune checkpoint inhibitors, under the control of a promoter that is activated by hypoxic conditions or by inflammatory conditions, such as any of the promoters activated by said conditions and described herein.

[0586] In some embodiments, the genetically engineered microorganisms of the disclosure are genetically engineered bacteria comprising a gene encoding a CTLA-4 inhibitor, for example, an antibody directed against CTLA-4. In any of these embodiments, the anti-CTLA-4 antibody may be a single-chain anti-CTLA-4 antibody. In some embodiments, the genetically engineered microorganisms of the disclosure are genetically engineered bacteria comprising a gene encoding a PD-1 inhibitor, for example, an antibody directed against PD-1 or PD-L1. In any of these embodiments, the anti-PD-1 or PD-L1 antibody may be a single-chain anti-PD-1 antibody. In some embodiments, the genetically engineered microorganisms of the disclosure are engineered bacteria comprising a gene encoding an inhibitor selected from CTLA-4, PD-1, PD-L1, PD-L2, TIGIT, VISTA, LAG-3, TIM1, TIM3, CEACAM1, LAIR-1, HVEM, BTLA, CD160, CD200, CD200R, CD39, CD73, B7-H3, B7-H4, IDO, TDO, KIR, and A2aR inhibitors, e.g., an antibody directed against any of the listed immune checkpoints or other suppressor molecules. Examples of such checkpoint inhibitor molecules are described e.g., in International Patent Application PCT/US2017/013072, filed Jan. 11, 2017, published as WO2017/123675, and PCT/US2018/012698, filed Jan. 1, 2018, the contents of each of which is herein incorporated by reference in its entirety. In any of these embodiments, the antibody may be a single-chain antibody. In some embodiments, the engineered bacteria expressing a checkpoint inhibitor, or inhibitor of another immune suppressor molecule, is administered locally, e.g., via intratumoral injection.

[0587] In some embodiments, the disclosure provides a genetically engineered microorganism, e.g., engineered bacterium, that expresses a CTLA-4 inhibitor. In some embodiments, the genetically engineered bacterium expresses a CTLA-4 inhibitor under the control of a promoter that is activated by low-oxygen conditions, e.g., the hypoxic environment of a tumor. In some embodiments, the genetically engineered bacterium expresses an anti-CTLA-4 antibody, for example, a single chain antibody. In some embodiments, the genetically engineered bacterium is bacterium that expresses an anti-CTLA-4 antibody, for example, a single chain antibody. In some embodiments, the genetically engineered bacterium expresses an anti-CTLA-4 antibody, for example, a single chain antibody, under the control of a promoter that is activated by low-oxygen conditions. In some embodiments, the genetically engineered bacterium is a bacterium that expresses an anti-CTLA-4 antibody, for example, a single chain antibody, under the control of a promoter that is activated by low-oxygen conditions.

[0588] In some embodiments, the genetically engineered microorganism is a bacterium that expresses a PD-1 inhibitor. In some embodiments, the genetically engineered bacterium expresses a PD-1 inhibitor under the control of a promoter that is activated by low-oxygen conditions, e.g., the hypoxic environment of a tumor. In some embodiments, the genetically engineered microorganism is a bacterium that expresses a PD-1 inhibitor under the control of a promoter that is activated by low-oxygen conditions, e.g., the hypoxic environment of a tumor. In some embodiments, the genetically engineered bacterium expresses an anti-PD-1 antibody, e.g., single chain antibody. In some embodiments, the genetically engineered bacterium is a bacterium that expresses an anti-PD-1 antibody, e.g., single chain antibody. In some embodiments, the genetically engineered bacterium expresses an anti-PD-1 antibody, e.g., single chain antibody, under the control of a promoter that is activated by low-oxygen conditions. In some embodiments, the genetically engineered bacterium is a bacterium that expresses an anti-PD-1 antibody, e.g., single chain antibody, under the control of a promoter that is activated by low-oxygen conditions.

[0589] In some embodiments, the nucleic acid encoding an scFv construct, e.g., a PD1-scFv, comprises a sequence which has at least about 80%, at least about 85%, at least about 90%, at least about 95%, or at least about 99% identity to a sequence selected from SEQ ID NO: 975, SEQ ID NO: 976, SEQ ID NO: 977, SEQ ID NO: 978, SEQ ID NO: 979, and/or SEQ ID NO: 980. In some embodiments, the nucleic acid encoding an scFv construct, e.g., a PD1-scFv, comprises a sequence selected from SEQ ID NO: 975, SEQ ID NO: 976, SEQ ID NO: 977, SEQ ID NO: 978, SEQ ID NO: 979, and/or SEQ ID NO: 980. In some embodiments, the nucleic acid encoding an scFv construct, e.g., a PD1-scFv, consists of a sequence selected from SEQ ID NO: 975, SEQ ID NO: 976, SEQ ID NO: 977, SEQ ID NO: 978, SEQ ID NO: 979, and/or SEQ ID NO: 980.

[0590] In some embodiments, the genetically engineered bacterium expresses a PD-L1 inhibitor. In some embodiments, the genetically engineered bacterium expresses an anti-PD-L1 antibody, e.g., single chain antibody. In some embodiments, the genetically engineered bacterium is a bacterium that expresses an anti-PD-L1 antibody, e.g., single chain antibody. In some embodiments, the genetically engineered bacterium is a bacterium that expresses an anti-PD-L1 antibody, e.g., single chain antibody under the control of a promoter that is activated by low-oxygen conditions.

[0591] In some embodiments, the genetically engineered bacterium is a bacterium that expresses an PD-L2 inhibitor. In some embodiments, the genetically engineered bacterium is a bacterium that expresses an anti-PD-L2 antibody, e.g., single chain antibody. In some embodiments, the genetically engineered bacterium is a bacterium that expresses an anti-PD-L2 antibody, e.g., single chain antibody. In some embodiments, the genetically engineered bacterium is a bacterium that expresses an anti-PD-L2 antibody, e.g., single chain antibody under the control of a promoter that is activated by low-oxygen conditions.

[0592] Exemplary heavy and light chain amino acid sequences for use in constructing single-chain anti-CTLA-4 antibodies are shown are described herein (e.g., SEQ ID NO: 761, SEQ ID NO: 762, SEQ ID NO: 763, SEQ ID NO: 764).

[0593] Exemplary heavy and light chain amino acid sequences for use in constructing single-chain anti-PD-1 antibodies include SEQ ID NO: 1, SEQ ID NO: 2, SEQ ID NO: 3, and/or SEQ ID NO: 4.

[0594] In some embodiments, the sequence is at least about 80%, at least about 85%, at least about 90%, at least about 95%, or at least about 99% homologous to the sequence of SEQ ID NO: 1, SEQ ID NO: 2, SEQ ID NO: 3, and/or SEQ ID NO: 4. Other exemplary heavy and light chain amino acid sequences for construction of single chain antibodies include SEQ ID NO: 5-46.

[0595] In some embodiments, the single chain antibody is at least about 80%, at least about 85%, at least about 90%, at least about 95%, or at least about 99% homologous to the sequence of SEQ ID NO: 5, SEQ ID NO: 6, SEQ ID NO: 7, SEQ ID NO: 8, SEQ ID NO: 9, SEQ ID NO: 10, SEQ ID NO: 11, SEQ ID NO: 12, SEQ ID NO: 13, SEQ ID NO: 14, SEQ ID NO: 15, SEQ ID NO: 16, SEQ ID NO: 17, SEQ ID NO: 18, SEQ ID NO: 19, SEQ ID NO: 20, SEQ ID NO: 21, SEQ ID NO: 22, SEQ ID NO: 23, SEQ ID NO: 24, SEQ ID NO: 25, SEQ ID NO: 26, SEQ ID NO: 27, SEQ ID NO: 28, SEQ ID NO: 29, SEQ ID NO: 30, SEQ ID NO: 31, SEQ ID NO: 32, SEQ ID NO: 33, SEQ ID NO: 34, SEQ ID NO: 35, SEQ ID NO: 36, SEQ ID NO: 37, SEQ ID NO: 38, SEQ ID NO: 39, SEQ ID NO: 40, SEQ ID NO: 41, SEQ ID NO: 42, SEQ ID NO: 43, SEQ ID NO: 44 SEQ ID NO:45, or SEQ ID NO: 46.

[0596] In some embodiments, genetically engineered bacteria comprise a nucleic acid sequence that encodes a polypeptide that is at least about 80%, at least about 85%, at least about 90%, at least about 95%, or at least about 99% homologous to the DNA sequence of SEQ ID NO: 1, SEQ ID NO: 2, SEQ ID NO: 3, and/or SEQ ID NO: 4.

[0597] In some embodiments, the genetically engineered microorganisms are capable of expressing any one or more of the described CTLA-4, PD-1, PD-L1, PD-L2, TIGIT, VISTA, LAG-3, TIM1, TIM3, CEACAM1, LAIR-1, HVEM, BTLA, CD160, CD200, CD200R, CD39, CD73, B7-H3, B7-H4, IDO, TDO, KIR, and A2aR circuits in low-oxygen conditions, and/or in the presence of cancer and/or in the tumor microenvironment, or tissue specific molecules or metabolites, and/or in the presence of molecules or metabolites associated with inflammation or immune suppression, and/or in the presence of metabolites that may be present in the gut, and/or in the presence of metabolites that may or may not be present in vivo, and may be present in vitro during strain culture, expansion, production and/or manufacture, such as arabinose, cumate, and salicylate and others described herein. In some embodiments such an inducer may be administered in vivo to induce effector gene expression. In some embodiments, the gene sequences(s) encoding CTLA-4, PD-1, PD-L1, PD-L2, TIGIT, VISTA, LAG-3, TIM1, TIM3, CEACAM1, LAIR-1, HVEM, BTLA, CD160, CD200, CD200R, CD39, CD73, B7-H3, B7-H4, IDO, TDO, KIR, and A2aR are controlled by a promoter inducible by such conditions and/or inducers. In some embodiments, the gene sequences(s) encoding CTLA-4, PD-1, PD-L1, PD-L2, TIGIT, VISTA, LAG-3, TIM1, TIM3, CEACAM1, LAIR-1, HVEM, BTLA, CD160, CD200, CD200R, CD39, CD73, B7-H3, B7-H4, IDO, TDO, KIR, and A2aR are controlled by a constitutive promoter, as described herein. In some embodiments, the gene sequences(s) are controlled by a constitutive promoter, and are expressed in in vivo conditions and/or in vitro conditions, e.g., during expansion, production and/or manufacture, as described herein. In some embodiments, any one or more of the described genes sequences encoding CTLA-4, PD-1, PD-L1, PD-L2, TIGIT, VISTA, LAG-3, TIM1, TIM3, CEACAM1, LAIR-1, HVEM, BTLA, CD160, CD200, CD200R, CD39, CD73, B7-H3, B7-H4, IDO, TDO, KIR, and A2aR are present on one or more plasmids (e.g., high copy or low copy) or are integrated into one or more sites in the microorganismal chromosome.

[0598] In any of these embodiments, the genetically engineered bacteria comprising gene sequence(s) encoding CTLA-4, PD-1, PD-L1, PD-L2, TIGIT, VISTA, LAG-3, TIM1, TIM3, CEACAM1, LAIR-1, HVEM, BTLA, CD160, CD200, CD200R, CD39, CD73, B7-H3, B7-H4, IDO, TDO, KIR, and A2aR further comprise gene sequence(s) encoding one or more further effector molecule(s), i.e., therapeutic molecule(s) or a metabolic converter(s). In any of these embodiments, the circuit encoding CTLA-4, PD-1, PD-L1, PD-L2, TIGIT, VISTA, LAG-3, TIM1, TIM3, CEACAM1, LAIR-1, HVEM, BTLA, CD160, CD200, CD200R, CD39, CD73, B7-H3, B7-H4, IDO, TDO, KIR, and A2aR may be combined with a circuit encoding one or more immune initiators or immune sustainers as described herein, in the same or a different bacterial strain (combination circuit or mixture of strains). The circuit encoding the immune initiators or immune sustainers may be under the control of a constitutive or inducible promoter, e.g., low oxygen inducible promoter or any other constitutive or inducible promoter described herein.

[0599] In any of these embodiments, the gene sequence(s) encoding CTLA-4, PD-1, PD-L1, PD-L2, TIGIT, VISTA, LAG-3, TIM1, TIM3, CEACAM1, LAIR-1, HVEM, BTLA, CD160, CD200, CD200R, CD39, CD73, B7-H3, B7-H4, IDO, TDO, KIR, and A2aR may be combined with gene sequence(s) encoding one or more STING agonist producing enzymes, as described herein, in the same or a different bacterial strain (combination circuit or mixture of strains). In some embodiments, the gene sequences which are combined with the gene sequence(s) encoding CTLA-4, PD-1, PD-L1, PD-L2, TIGIT, VISTA, LAG-3, TIM1, TIM3, CEACAM1, LAIR-1, HVEM, BTLA, CD160, CD200, CD200R, CD39, CD73, B7-H3, B7-H4, IDO, TDO, KIR, and A2aR encode DacA. DacA may be under the control of a constitutive or inducible promoter, e.g., low oxygen inducible promoter such as FNR or any other constitutive or inducible promoter described herein. In some embodiments, the dacA gene is integrated into the chromosome. In some embodiments, the gene sequences which are combined with the gene sequence(s) encoding CTLA-4, PD-1, PD-L1, PD-L2, TIGIT, VISTA, LAG-3, TIM1, TIM3, CEACAM1, LAIR-1, HVEM, BTLA, CD160, CD200, CD200R, CD39, CD73, B7-H3, B7-H4, IDO, TDO, KIR, and A2aR encode cGAS. cGAS may be under the control of a constitutive or inducible promoter, e.g., low oxygen inducible promoter such as FNR or any other constitutive or inducible promoter described herein. In some embodiments, the gene encoding cGAS is integrated into the chromosome.

[0600] In any of these combination embodiments, the bacteria may further comprise an auxotrophic modification, e.g., a mutation or deletion in DapA, ThyA, or both. In any of these embodiments, the bacteria may further comprise a phage modification, e.g., a mutation or deletion, in an endogenous prophage as described herein.

[0601] Also, in some embodiments, the genetically engineered microorganisms are capable of expressing any one or more of the described circuits encoding CTLA-4, PD-1, PD-L1, PD-L2, TIGIT, VISTA, LAG-3, TIM1, TIM3, CEACAM1, LAIR-1, HVEM, BTLA, CD160, CD200, CD200R, CD39, CD73, B7-H3, B7-H4, IDO, TDO, KIR, and A2aR and further comprise one or more of the following: (1) one or more auxotrophies, such as any auxotrophies known in the art and provided herein, e.g., thyA auxotrophy, (2) one or more kill switch circuits, such as any of the kill-switches described herein or otherwise known in the art, (3) one or more antibiotic resistance circuits, (4) one or more transporters for importing biological molecules or substrates, such any of the transporters described herein or otherwise known in the art, (5) one or more secretion circuits, such as any of the secretion circuits described herein and otherwise known in the art, (6) one or more surface display circuits, such as any of the surface display circuits described herein and otherwise known in the art and (7) one or more circuits for the production or degradation of one or more metabolites (e.g., kynurenine, tryptophan, adenosine, arginine) described herein (8) combinations of one or more of such additional circuits. In any of these embodiments, the genetically engineered bacteria may be administered alone or in combination with one or more immune checkpoint inhibitors described herein, including but not limited anti-CTLA4, anti-PD1, or anti-PD-L1 antibodies.

### Immuno-Metabolism and Metabolic Converters

### Tryptophan and Kynurenine

[0602] T regulatory cells, or Tregs, are a subpopulation of T cells that modulate the immune system by preventing excessive immune reactions, maintaining tolerance to self-antigens, and abrogating autoimmunity. Tregs suppress the immune responses of other cells, for example, shutting down immune responses after they have successfully eliminated invading organisms. These cells generally suppress or downregulate induction and proliferation of effector T cells. There are different sub-populations of regulatory T cells, including those that express CD4, CD25, and Foxp3 (CD4+CD25+ regulatory T cells). Tregs are key to dampening effector T cell responses, and therefore represent one of the main obstacles to effective anti-tumor response and the failure of current therapies that rely on induction or potentiation of anti-tumor responses. Thus, in certain embodiments, the genetically engineered bacteria of the present disclosure produce one or more immune modulators that deplete Tregs and/or inhibit or block the activation of Tregs.

[0603] The tryptophan (TRP) to kynurenine (KYN) metabolic pathway is established as a key regulator of innate and adaptive immunity. Both the degradation of the essential amino acid tryptophan via indoleamine-2,3-dioxygenase 1 (IDO1) and TRP-2,3-dioxygenase 2 (TDO) and the resulting production of aryl hydrocarbon receptor (AHR) activating tryptophan metabolites, such as kynurenine, is a central pathway maintaining the immunosuppressive microenvironment in many types of cancers. For example, binding of kynurenine to AHR results in reprograming the differentiation of naïve CD4+T-helper (Th) cells favoring a regulatory T cells phenotype (Treg) while suppressing the differentiation into interleukin-17 (IL-17)-producing Th (Th17) cells. Activation of the aryl hydrogen receptor also results in promoting a tolerogenic phenotype on dendritic cells.

[0604] In some embodiments, the genetically engineered microorganisms of the present disclosure, e.g., genetically engineered bacteria are capable of depleting Tregs or inhibiting or blocking the activation of Tregs by producing tryptophan and/or degrading kynurenine. In some embodiments, the genetically engineered microorganisms of the present disclosure capable of increasing the CD8+: Treg ratio (e.g., favors the production of CD8+ over Tregs) by producing tryptophan and/or degrading kynurenine.

### Increasing Tryptophan

[0605] In some embodiments, the genetically engineered microorganisms of the present disclosure are capable of producing tryptophan. In some embodiments, the genetically engineered bacteria and/or other microorganisms that produce tryptophan comprise one or more gene sequences encoding one or more enzymes of the tryptophan biosynthetic pathway. In some embodiments, the genetically engineered bacteria comprise sequence(s) encoding trpE, trpD, trpC, trpF, trpB, and trpA genes from B. subtilis or E. coli. and optionally comprise gene sequence(s) to produce the tryptophan precursor, chorismite, e.g., sequence(s) encoding aroG, aroF, aroH, aroB, aroD, aroE, aroK, and AroC, and optionally either a wild type or a feedback resistant SerA gene. Optionally, AroG and TrpE are replaced with feedback resistant versions. In any of these embodiments, the tryptophan repressor (trpR) optionally may be deleted, mutated, or modified so as to diminish or obliterate its repressor function. In any of these embodiments, the tnaA gene (encoding a tryptophanase converting Trp into indole) optionally may be deleted. Examples of such checkpoint inhibitor molecules are described e.g., in International Patent Application PCT/US2017/013072, filed Jan. 11, 2017, published as WO2017/123675, and PCT/US2018/012698, filed Jan. 1, 2018, the contents of each of which is herein incorporated by reference in its entirety.

[0606] In some embodiments, the genetically engineered bacteria are capable of expressing any one or more of the described circuits in low-oxygen conditions, and/or in the presence of cancer and/or the tumor microenvironment and/or the tumor microenvironment or tissue specific molecules or metabolites, and/or in the presence of molecules or metabolites associated with inflammation or immune suppression, and/or in the presence of metabolites that may be present in the tumor or the gut, and/or in the presence of metabolites that may or may not be present in vivo, and may be present in vitro during strain culture, expansion, production and/or manufacture, such as arabinose, cumate, and salicylate and others described herein. In some embodiments such an inducer may be administered in vivo to induce effector gene expression. In some embodiments, the gene sequences(s) are controlled by a promoter inducible by such conditions and/or inducers. In some embodiments, the gene sequences(s) are controlled by a constitutive promoter, as described herein. In some embodiments, the gene sequences(s) are controlled by a constitutive promoter, and are expressed in in vivo conditions and/or in vitro conditions, e.g., during bacterial expansion, production and/or manufacture, as described herein.

[0607] In some embodiments, any one or more of the described circuits are present on one or more plasmids (e.g., high copy or low copy) or are integrated into one or more sites in the bacterial chromosome. Also, in some embodiments, the genetically engineered bacteria and/or other microorganisms are further capable of expressing any one or more of the described circuits and further comprise one or more of the following: (1) one or more initiator circuits, including but not limited to, one or more enzymes for the production of a STING agonist, as described herein, (2) one or more sustainer circuits, as described herein, (3) one or more auxotrophies, such as any auxotrophies known in the art and provided herein, e.g., thyA auxotrophy, (2) one or more kill switch circuits, described herein or otherwise known in the art, (3) one or more antibiotic resistance circuits, (4) one or more transporters for importing biological molecules or substrates, described herein or otherwise known in the art, (5) one or more secretion circuits, described herein and otherwise known in the art, (6) one or more surface display circuits, described herein and otherwise known in the art and (7) one or more circuits for the production or degradation of one or more metabolites (metabolic converters) (e.g., kynurenine, tryptophan, adenosine, arginine) described herein and (8) combinations of one or more of such additional circuits. In any of these embodiments, the genetically engineered bacteria may be administered alone or in combination with one or more immune checkpoint inhibitors described herein, including but not limited to anti-CTLA4 antibodies, anti-PD1 and/or anti-PDL1 antibodies.

### Decreasing Kynurenine

[0608] In some embodiments, the genetically engineered bacteria and/or other microorganisms comprise a mechanism for metabolizing or degrading kynurenine, and reducing kynurenine levels in the extracellular environment. In some embodiments, the genetically engineered bacteria and/or other microorganisms comprise gene sequence(s) encoding kynureninase.

[0609] In one embodiments, the genetically engineered microorganisms encode gene sequences for the expression of kynureninase from Pseudomonas fluorescens, which converts kynurenine to AA (Anthranillic acid), which then can be converted to tryptophan through the enzymes of the E. coli trp operon. Optionally, the trpE gene may be deleted as it is not needed for the generation of tryptophan from kynurenine. Accordingly, in one embodiment, the genetically engineered bacteria may comprise one or more gene(s) or gene cassette(s) encoding trpD, trpC, trpA, and trpD and kynureninase. This deletion may prevent tryptophan production through the endogenous chorismate pathway, and may increase the production of tryptophan from kynurenine through kynureninase.

[0610] In alternate embodiments, the trpE gene is not deleted, in order to maximize tryptophan production by using both kynurenine and chorismate as a substrate. In one embodiment of the invention, the genetically engineered bacteria and/or other microorganisms comprising this circuit may be useful for reducing immune escape in cancer.

[0611] In some embodiments, the microorganisms encode a transporter for the uptake of kynurenine from the extracellular environment, e.g., the tumor environment. AroT, located between chr and the trp operon in Salmonella typhimurium, and similar genes, aroR and aroS, near the trp locus of Escherichia coli, were found to be involved in the transport of aromatic amino acids. AroP is a permease that is involved in the transport across the cytoplasmic membrane of the aromatic amino acids (phenylalanine, tyrosine, and tryptophan). Expression of such transporters/permeases may be useful for kynurenine import in the genetically engineered microorganisms.

[0612] Exemplary genes encoding kynureninase which are encoded by the genetically engineered bacteria of the disclosure in certain embodiments include SEQ ID NO: 65-67

[0613] In one embodiment, one or more polypeptides and/or polynucleotides encoded and expressed by the genetically engineered bacteria have at least about 80% identity with one or more of SEQ ID NO: 65 through SEQ ID NO: 67. In one embodiment, one or more polypeptides and/or polynucleotides encoded and expressed by the genetically engineered bacteria have at least about 85% identity with one or more of SEQ ID NO: 65 through SEQ ID NO: 67. In one embodiment, one or more polypeptides and/or polynucleotides encoded and expressed by the genetically engineered bacteria have at least about 90% identity with one or more of SEQ ID NO: 65 through SEQ ID NO: 67. In one embodiment, one or more polypeptides and/or polynucleotides encoded and expressed by the genetically engineered bacteria have at least about 95% identity with one or more of SEQ ID NO: 65 through SEQ ID NO: 67. In one embodiment, one or more polypeptides and/or polynucleotides encoded and expressed by the genetically engineered bacteria have at least about 96%, 97%, 98%, or 99% identity with one or more of SEQ ID NO: 65 through SEQ ID NO: 67. Accordingly, in one embodiment, one or more polypeptides and/or polynucleotides expressed by the genetically engineered bacteria have at least about 80%, 81%, 82%, 83%, 84%, 85%, 86%, 87%, 88%, 89%, 90%, 91%, 92%, 93%, 94%, 95%, 96%, 97%, 98%, or 99% identity with one or more of SEQ ID NO: 65 through SEQ ID NO: 67. In another embodiment, one or more polynucleotides and/or polypeptides encoded and expressed by the genetically engineered bacteria comprise the sequence of one or more of SEQ ID NO: 65 through SEQ ID NO: 67. In another embodiment, one or more polynucleotides and/or polypeptides encoded and expressed by the genetically engineered bacteria consist of the sequence of one or more of SEQ ID NO: 65 through SEQ ID NO: 67.

[0614] Exemplary codon-optimized kynureninase cassette sequences include SEQ ID NO: 68, 865, 69, 866, 70, 867. In one embodiment, one or more polynucleotides encoded and expressed by the genetically engineered bacteria have at least about 80% identity with one or more of SEQ ID NO: 68 through SEQ ID NO: 70 and SEQ ID NO: 865 through SEQ ID NO: 868. In one embodiment, one or more polynucleotides encoded and expressed by the genetically engineered bacteria have at least about 85% identity with one or more of SEQ ID NO: 68 through SEQ ID NO: 70 and SEQ ID NO: 865 through SEQ ID NO: 868. In one embodiment, one or more polynucleotides encoded and expressed by the genetically engineered bacteria have at least about 90% identity with one or more of SEQ ID NO: 68 through SEQ ID NO: 70 and SEQ ID NO: 865 through SEQ ID NO: 868. In one embodiment, one or more polynucleotides encoded and expressed by the genetically engineered bacteria have at least about 95% identity with one or more of SEQ ID NO: 68 through SEQ ID NO: 70 and SEQ ID NO: 865 through SEQ ID NO: 868. In one embodiment, one or more polynucleotides encoded and expressed by the genetically engineered bacteria have at least about 96%, 97%, 98%, or 99% identity with one or more of SEQ ID NO: 68 through SEQ ID NO: 70 and SEQ ID NO: 865 through SEQ ID NO: 868. Accordingly, in one embodiment, one or more polynucleotides expressed by the genetically engineered bacteria have at least about 80%, 81%, 82%, 83%, 84%, 85%, 86%, 87%, 88%, 89%, 90%, 91%, 92%, 93%, 94%, 95%, 96%, 97%, 98%, or 99% identity with one or more of SEQ ID NO: 68 through SEQ ID NO: 70 and SEQ ID NO: 865 through SEQ ID NO: 868. In another embodiment, one or more polynucleotides encoded and expressed by the genetically engineered bacteria comprise the sequence of one or more of SEQ ID NO: 68 through SEQ ID NO: 70 and SEQ ID NO: 865 through SEQ ID NO: 868. In another embodiment, one or more polynucleotides encoded and expressed by the genetically engineered bacteria consists of the sequence of one or more of SEQ ID NO: 68 through SEQ ID NO: 70 and SEQ ID NO: 865 through SEQ ID NO: 868.

[0615] In some embodiments, the construct for expression of Pseudomonas fluorescens Kynureninase is at least about 80%, at least about 85%, at least about 90%, at least about 95%, or at least about 99% homologous to a sequence selected from SEQ ID NO: 116, SEQ ID NO: 888, SEQ ID NO: 889, SEQ ID NO: 890, SEQ ID NO: 891, SEQ ID NO: 892, and/or SEQ ID NO: 893. In some embodiments, the construct for expression of Pseudomonas fluorescens Kynureninase comprises a sequence selected from SEQ ID NO: 116, SEQ ID NO: 888, SEQ ID NO: 889, SEQ ID NO: 890, SEQ ID NO: 891, SEQ ID NO: 892, and/or SEQ ID NO: 893. In some embodiments, the construct for expression of Pseudomonas fluorescens Kynureninase consists of a sequence selected from SEQ ID NO: 116, SEQ ID NO: 888, SEQ ID NO: 889, SEQ ID NO: 890, SEQ ID NO: 891, SEQ ID NO: 892, and/or SEQ ID NO: 893. Other suitable kynureninase are described in US Patent Publication 20170056449, the contents of which is herein incorporated by reference in its entirety.

[0616] In any of these embodiments, the bacteria genetically engineered to consume kynurenine and optionally produce tryptophan consume 0% to 2% to 4%, 4% to 6%,6% to 8%, 8% to 10%, 10% to 12%, 12% to 14%, 14% to 16%, 16% to 18%, 18% to 20%, 20% to 25%,25% to 30%, 30% to 35%, 35% to 40%,40% to 45% 45% to 50%, 50% to 55%, 55% to 60%, 60% to 65%, 65% to 70% to 80%, 80% to 90%, or 90% to 100% more kynurenine than unmodified bacteria of the same bacterial subtype under the same conditions. In yet another embodiment, the genetically engineered bacteria consume 1.0-1.2-fold, 1.2-1.4-fold, 1.4-1.6-fold, 1.6-1.8-fold, 1.8-2-fold, or two-fold more kynurenine than unmodified bacteria of the same bacterial subtype under the same conditions. In yet another embodiment, the genetically engineered bacteria consume about three-fold, four-fold, about three-fold, four-fold, five-fold, six-fold, seven-fold, eight-fold, nine-fold, ten-fold, fifteen-fold, twenty-fold, thirty-fold, forty-fold, fifty-fold, hundred-fold, five hundred-fold, one-thousand-fold, or more greater amounts of kynurenine than unmodified bacteria of the same bacterial subtype under the same conditions.

[0617] In any of these embodiments, the bacteria genetically engineered to consume kynurenine and optionally produce tryptophan produce at least about 0% to 2% to 4%, 4% to 6%,6% to 8%, 8% to 10%, 10% to 12%, 12% to 14%, 14% to 16%, 16% to 18%, 18% to 20%, 20% to 25%,25% to 30%, 30% to 35%, 35% to 40%,40% to 45% 45% to 50%, 50% to 55%, 55% to 60%, 60% to 65%, 65% to 70% to 80%, 80% to 90%, or 90% to 100% more tryptophan than unmodified bacteria of the same bacterial subtype under the same conditions. In yet another embodiment, the genetically engineered bacteria produce at least about 1.0-1.2-fold, 1.2-1.4-fold, 1.4-1.6-fold, 1.6-1.8-fold, 1.8-2-fold, or two-fold more tryptophan than unmodified bacteria of the same bacterial subtype under the same conditions. In yet another embodiment, the genetically engineered bacteria produce about three-fold, four-fold, five-fold, six-fold, seven-fold, eight-fold, nine-fold, ten-fold, fifteen-fold, twenty-fold, thirty-fold, forty-fold, or fifty-fold, hundred-fold, five hundred-fold, or one-thousand-fold more tryptophan than unmodified bacteria of the same bacterial subtype under the same conditions.

[0618] In any of these embodiments, the genetically engineered bacteria increase the kynurenine consumption rate by 0% to 2% to 4%, 4% to 6%,6% to 8%, 8% to 10%, 10% to 12%, 12% to 14%, 14% to 16%, 16% to 18%, 18% to 20%, 20% to 25%,25% to 30%, 30% to 35%, 35% to 40%,40% to 45% 45% to 50%, 50% to 55%, 55% to 60%, 60% to 65%, 65% to 70% to 80%, 80% to 90%, or 90% to 100% relative to unmodified bacteria of the same bacterial subtype under the same conditions. In yet another embodiment, the genetically engineered bacteria increase the kynurenine consumption rate by 1.0-1.2-fold, 1.2-1.4-fold, 1.4-1.6-fold, 1.6-1.8-fold, 1.8-2-fold, or two-fold more relative to unmodified bacteria of the same bacterial subtype under the same conditions. In yet another embodiment, the genetically engineered bacteria increase the kynurenine consumption rate by about three-fold, four-fold, five-fold, six-fold, seven-fold, eight-fold, nine-fold, ten-fold, fifteen-fold, twenty-fold, thirty-fold, forty-fold, or fifty-fold, hundred-fold, five hundred-fold, or one-thousand-fold relative to unmodified bacteria of the same bacterial subtype under the same conditions.

[0619] In one embodiment, the genetically engineered bacteria increase the kynurenine consumption by about 80% to 100% relative to unmodified bacteria of the same bacterial subtype under the same conditions, after 4 hours. In one embodiment, the genetically engineered bacteria increase the kynurenine consumption by about 90% to 100% relative to unmodified bacteria of the same bacterial subtype under the same conditions after 4 hours. In one specific embodiment, the genetically engineered bacteria increase the kynurenine consumption by about 95% to 100% relative to unmodified bacteria of the same bacterial subtype under the same conditions, after 4 hours. In one specific embodiment, the genetically engineered bacteria increase the kynurenine consumption by about 99% to 100% relative to unmodified bacteria of the same bacterial subtype under the same conditions, after 4 hours. In yet another embodiment, the genetically engineered bacteria increase the kynurenine consumption by about 10-50 fold after 4 hours. In yet another embodiment, the genetically engineered bacteria increase the kynurenine consumption by about 50-100 fold after 4 hours. In yet another embodiment, the genetically engineered bacteria increase the kynurenine consumption by about 100-500 fold after 4 hours. In yet another embodiment, the genetically engineered bacteria increase the kynurenine consumption by about 500-1000 fold after 4 hours. In yet another embodiment, the genetically engineered bacteria increase the kynurenine consumption by about 1000-5000 fold after 4 hours. In yet another embodiment, the genetically engineered bacteria increase the kynurenine consumption by about 5000-10000 fold after 4 hours. In yet another embodiment, the genetically engineered bacteria increase the kynurenine consumption by about 10000-1000 fold after 4 hours.

[0620] In any of these embodiments, the genetically engineered bacteria are capable of reducing cell proliferation, e.g., in the tumor, by at least about 10% to 20%, 20% to 25%, 25% to 30%, 30% to 40%, 40% to 50%, 50% to 60%, 60% to 70%, 70% to 75%, 75% to 80%, 80% to 85%, 85% to 90%, 90% to 95%, 95% to 99%, or more as compared to an unmodified bacteria of the same subtype under the same conditions. In any of these embodiments, the genetically engineered bacteria are capable of reducing tumor growth by at least about 10% to 20%, 20% to 25%, 25% to 30%, 30% to 40%, 40% to 50%, 50% to 60%, 60% to 70%, 70% to 75%, 75% to 80%, 80% to 85%, 85% to 90%, 90% to 95%, 95% to 99%, or more as compared to an unmodified bacteria of the same subtype under the same conditions. In any of these embodiments, the genetically engineered bacteria are capable of reducing tumor size by at least about 10% to 20%, 20% to 25%, 25% to 30%, 30% to 40%, 40% to 50%, 50% to 60%, 60% to 70%, 70% to 75%, 75% to 80%, 80% to 85%, 85% to 90%, 90% to 95%, 95% to 99%, or more as compared to an unmodified bacteria of the same subtype under the same conditions. In any of these embodiments, the genetically engineered bacteria are capable of reducing tumor volume by at least about 10% to 20%, 20% to 25%, 25% to 30%, 30% to 40%, 40% to 50%, 50% to 60%, 60% to 70%, 70% to 75%, 75% to 80%, 80% to 85%, 85% to 90%, 90% to 95%, 95% to 99%, or more as compared to an unmodified bacteria of the same subtype under the same conditions. In any of these embodiments, the genetically engineered bacteria are capable of reducing tumor weight by at least about 10% to 20%, 20% to 25%, 25% to 30%, 30% to 40%, 40% to 50%, 50% to 60%, 60% to 70%, 70% to 75%, 75% to 80%, 80% to 85%, 85% to 90%, 90% to 95%, 95% to 99%, or more as compared to an unmodified bacteria of the same subtype under the same conditions.

[0621] In some embodiments, the kynureninase is secreted into the extracellular environment, e.g., tumor microenvironment, using a secretion system described herein.

[0622] In some embodiments, the genetically engineered bacteria and/or other microorganisms comprise a mechanism for metabolizing or degrading kynurenine, which, in some embodiments, also results in the increased production of tryptophan. In some embodiments, the genetically engineered bacteria modulate the TRP: KYN ratio or the KYN: TRP ratio in the extracellular environment. In some embodiments, the genetically engineered bacteria increase the TRP: KYN ratio or the KYN: TRP ratio. In some embodiments, the genetically engineered bacteria reduce the TRP: KYN ratio or the KYN: TRP ratio. In some embodiments, the genetically engineered bacteria comprise sequence encoding the enzyme kynureninase, and further any of the tryptophan production circuits described herein.

[0623] The genetically engineered bacteria and/or other microorganisms may comprise any suitable gene for producing kynureninase. In some embodiments, the gene for producing kynureninase is modified and/or mutated, e.g., to enhance stability, increase kynureninase production. In some embodiments, the engineered bacteria and/or other microorganisms also have enhanced uptake or import of kynurenine, e.g., comprise a transporter or other mechanism for increasing the uptake of kynurenine into the bacteria and/or other microorganisms cell.

[0624] In some embodiments, the genetically engineered bacteria and/or other microorganisms are capable of producing kynureninase under inducing conditions, e.g., under a condition(s) associated with immune suppression and/or tumor microenvironment. In some embodiments, the genetically engineered bacteria and/or other microorganisms are capable of producing kynureninase in low-oxygen conditions, in the presence of certain molecules or metabolites associated with cancer, or certain tissues, immune suppression, or inflammation, or in the presence of some other metabolite that may or may not be present in vivo, e.g, in the tumor microenvironment, and may be present in vitro during strain culture, expansion, production and/or manufacture, such as arabinose, cumate, and salicylate.

[0625] In some embodiments, the gene sequences(s) are controlled by a promoter inducible by such conditions and/or inducers. In some embodiments, the gene sequences(s) are controlled by a constitutive promoter, as described herein. In some embodiments, the gene sequences(s) are controlled by a constitutive promoter, and are expressed in in vivo conditions and/or in vitro conditions, e.g., during bacteria and/or other microorganismal expansion, production and/or manufacture, as described herein. In some embodiments, any one or more of the described circuits are present on one or more plasmids (e.g., high copy or low copy) or are integrated into one or more sites in the bacterial chromosome.

[0626] In any of these embodiments, the genetically engineered bacteria comprising gene sequence(s) encoding kynureninase, e.g., from Pseudomonas fluorescens, further comprise gene sequence(s) encoding one or more further effector molecule(s), i.e., therapeutic molecule(s) or a metabolic converter(s). In any of these embodiments, the circuit encoding kynureninase, e.g., from Pseudomonas fluorescens, may be combined with a circuit encoding one or more immune initiators or immune sustainers as described herein, in the same or a different bacterial strain (combination circuit or mixture of strains). The circuit encoding the immune initiators or immune sustainers may be under the control of a constitutive or inducible promoter, e.g., low oxygen inducible promoter or any other constitutive or inducible promoter described herein.

[0627] In any of these embodiments, the gene sequence(s) encoding kynureninase, e.g., from Pseudomonas fluorescens, may be combined with gene sequence(s) encoding one or more STING agonist producing enzymes, as described herein, in the same or a different bacterial strain (combination circuit or mixture of strains). In some embodiments, the gene sequences which are combined with the gene sequence(s) encoding kynureninase, e.g., from Pseudomonas fluorescens, encode DacA. DacA may be under the control of a constitutive or inducible promoter, e.g., low oxygen inducible promoter such as FNR or any other constitutive or inducible promoter described herein. In some embodiments, the dacA gene is integrated into the chromosome. In some embodiments, the gene sequences which are combined with the gene sequence(s) encoding kynureninase, e.g., from Pseudomonas fluorescens, encode cGAS. cGAS may be under the control of a constitutive or inducible promoter, e.g., low oxygen inducible promoter such as FNR or any other constitutive or inducible promoter described herein. In some embodiments, the gene encoding cGAS is integrated into the chromosome. In any of these combination embodiments, the bacteria may further comprise an auxotrophic modification, e.g., a mutation or deletion in DapA, ThyA, or both. In any of these embodiments, the bacteria may further comprise a phage modification, e.g., a mutation or deletion, in an endogenous prophage as described herein. Optionally the bacterial strain may further comprise tryptophan production circuitry described herein.

[0628] Also, in some embodiments, the genetically engineered bacteria and/or other microorganisms are further capable of expressing any one or more of the described circuits and further comprise one or more of the following: (1) one or more initiator circuits, including but not limited to, one or more enzymes for the production of a STING agonist, as described herein, (2) one or more sustainer circuits, as described herein, (3) one or more auxotrophies, such as any auxotrophies known in the art and provided herein, e.g., thyA auxotrophy, (2) one or more kill switch circuits, described herein or otherwise known in the art, (3) one or more antibiotic resistance circuits, (4) one or more transporters for importing biological molecules or substrates, described herein or otherwise known in the art, (5) one or more secretion circuits, described herein and otherwise known in the art, (6) one or more surface display circuits, described herein and otherwise known in the art and (7) one or more circuits for the production or degradation of one or more metabolites (metabolic converters) (e.g., kynurenine, tryptophan, adenosine, arginine) described herein and (8) combinations of one or more of such additional circuits. In any of these embodiments, the genetically engineered bacteria may be administered alone or in combination with one or more immune checkpoint inhibitors described herein, including but not limited to anti-CTLA4 antibodies, anti-PD1 and/or anti-PDL1 antibodies.

### Adaptive Laboratory Evolution (ALE)

[0629] E. coli Nissle can be engineered to efficiently import KYN and convert it to TRP by introducing the Kynureninase (KYNase) from Pseudomonas fluorescens (kynU) as described herein.

[0630] E. coli naturally utilizes anthranilate in its TRP biosynthetic pathway. Briefly, the TrpE (in complex with TrpD) enzyme converts chorismate into anthranilate. TrpD, TrpC, TrpA and TrpB then catalyze a five-step reaction ending with the condensation of an indole with serine to form tryptophan. By replacing the TrpE enzyme via lambda-RED recombineering, the subsequent strain of Nissle (AtrpE::Cm) is an auxotroph unable to grow in minimal media without supplementation of TRP or anthranilate. By expressing kynureninase in ΔtrpE::Cm (KYNase-trpE), this auxotrophy can be alternatively rescued by providing KYN.

[0631] As described herein, leveraging the growth-limiting nature of KYN in KYNase-trpE, adaptive laboratory evolution was employed to evolve a strain capable of increasingly efficient utilization of KYN.

[0632] Due to their ease of culture, short generation times, very high population densities and small genomes, microbes can be evolved to unique phenotypes in abbreviated timescales. Adaptive laboratory evolution (ALE) is the process of passaging microbes under selective pressure to evolve a strain with a preferred phenotype. Adaptive laboratory evolution is described in International Patent Application PCT/US2017/013072, filed Jan. 11, 2017, published as WO2017/123675, the contents of which is herein incorporated by reference in its entirety.

[0633] First a lower limit of KYN concentration was established and mutants were evolved by passaging in lowering concentrations of KYN. While this can select for mutants capable of increasing KYN import, the bacterial cells still prefer to utilize free, exogenous TRP. In the tumor environment, dual-therapeutic functions can be provided by depletion of KYN and increasing local concentrations of TRP. Therefore, to evolve a strain which prefers KYN over TRP, a toxic analogue of TRP—5-fluoro-L-tryptophan (ToxTRP)—can be incorporated into the ALE experiment. The resulting best performing strain is then whole genome sequenced in order to deconvolute the contributing mutations. Lambda-RED can be performed in order to reintroduce TrpE, to inactivate Trp regulation (trpR, tyrR, transcriptional attenuators) to up-regulate TrpABCDE expression and increase chorismate production. The resulting strain is now insensitive to external TRP, efficiently converts KYN into TRP, and also now overproduces TRP.

### Purinergic System—ATP/Adenosine Metabolism

[0634] An important barrier to successful cancer immunotherapy is that tumors employ a number of mechanisms to facilitate immune escape, including the production of anti-inflammatory cytokines, the recruitment of regulatory immune subsets, and the production of immunosuppressive metabolites. One such immunosuppressive pathway is the production of extracellular adenosine, a potent immunosuppressive molecule, by CD73 Immune-stimulatory extracellular ATP, released by damaged or dying cells and bacteria, promotes the recruitment of immune phagocytes and activates P2×7R, a coactivator of the NLRP3 inflammasome, which then triggers the production of proinflammatory cytokines, such as IL-1β and IL-18. The catabolism of extracellular ATP into ADP, AMP and adenosine is controlled by CD39 (ecto-nucleoside triphosphate diphosphohydrolase 1, E-NTPDase1) which hydrolyzes ATP into AMP, and CD73 (ecto-5′-nucleotidase, Ecto5′NTase) which dephosphorylates AMP into adenosine by. Thus, CD39 and CD73 act in concert to convert proinflammatory ATP into immunosuppressive adenosine. Beside its immunoregulatory roles, the ectonucleotidase pathway contributes directly to the modulation of cancer cell growth, differentiation, invasion, migration, metastasis, and tumor angiogenesis.

[0635] In some embodiments, the genetically engineered bacteria comprise a means for removing excess adenosine from the tumor microenvironment. Many bacteria scavenge low concentrations of nucleosides from the environment for synthesis of nucleotides and deoxynucleotides by salvage pathways of synthesis. Additionally, in Escherichia coli, nucleosides can be used as the sole source of nitrogen and carbon for growth (Neuhard J, Nygaard P. Biosynthesis and conversion of nucleotides, purines and pyrimidines. In: Neidhardt F C, Ingraham J L, Low K B, Magasanik B, Schaechter M, Umbarger H E, editors. Escherichia coli and Salmonella typhimurium: Cellular and molecular biology. Washington D.C.: ASM Press; 1987. pp. 445-473). Two evolutionarily unrelated cation-linked transporter families, the Concentrative Nucleoside Transporter (CNT) family and the Nucleoside: H+ Symporter (NHS) family, are responsible for nucleoside uptake (see e.g., Cabrita et al., Biochem. Cell Biol. Vol. 80, 2002. Molecular biology and regulation of nucleoside and nucleobase transporter proteins in eukaryotes and prokaryotes), the contents of which is herein incorporated by reference in its entirety. NupC and NupG, are the transporter family members in E. coli. Mutants defective in both the nupC and nupG genes cannot grow with nucleosides as a single carbon source. Both of these transporters are proton-linked but they differ in their selectivity. NupC is a nucleotide transporter of the H+/nucleotide symporter family. NupC pyrimidine nucleoside-H+ transporter mediates symport (i.e., H+-coupled substrate uptake) of nucleosides, particularly pyrimidines. Two known members of the family are found in gram positive and gram-negative bacteria. NupG is capable of transporting a wide range of nucleosides and deoxynucleosides; in contrast, NupC does not transport guanosine or deoxyguanosine. Homologs of NupG from E. coli are found in a wide range of eubacteria, including human gut pathogens such as Salmonella typhimurium, organisms associated with periodontal disease such as Porphyromonas gingivalis and Prevotella intermedia, and plant pathogens in the genus Erwinia (As described in Vaziri et al., Mol Membr Biol. 2013 March; 30(1-2): 114-128; Use of molecular modelling to probe the mechanism of the nucleoside transporter NupG, the contents of which is herein incorporated by reference in its entirety). Putative bacterial transporters from the CNT superfamily and transporters from the NupG/XapB family include those listed in the Table 5 and Table 6 below. In addition, codB (GenBank P25525, Escherichia coli) was identified based on homology to a yeast transporter family termed the uracil/allantoin transporter family (Cabrita et al., supra).

TABLE 5
Putative CNT family transporters

| Name | GenBank Acc. No. | Organism |
|---|---|---|
| BH1446 | BAB05165 | Bacillus halodurans |
| BsNupC | CAA57663 | B. subtilis |
| BsyutK | CAB15208 | B. subtilis |
| BsyxjA | CAB15938 | B. subtilis |
| CcCNT (CC2089) | AAK24060 | Caulobacter crescentus |
| (yeiJ) | AAC75222 | E. coli |
| (yeiM) | AAC75225 | E. coil |
| (HI0519) | AAC22177 | Haemophilus influenzae |
| (HP1180) | AAD08224 | Helicobacter pylori |
| (SA0600, SAV0645) | BAB41833, BAB56807 | Staphylococcus aureus |
| SpNupC | AAK34582 | Streptococcus pyogenes |
| (VC2352) | AAF95495 | Vibrio cholerae |
| (VC1953) | AAF95101 | V. cholera |
| (VCA0179) | AAF96092 | V. cholera |

TABLE 6
Bacterial transporters from the NupG/XapB family

| Protein (gene name) | GenBank accession No. | Organism |
|---|---|---|
| 1. yegT | P76417 | Escherichia coli |
| 2. NupG | P09452 | E. coli |
| 3. XapB | P45562 | E. coli |
| 4. (CC1628) | AAK23606 | Caulobacter crescentus |

[0636] In some embodiments, the genetically engineered bacteria comprise a means for importing adenosine into the engineered bacteria from the tumor microenvironment. In some embodiments, the genetically engineered bacteria comprise sequence for encoding a nucleoside transporter. In some embodiments, the genetically engineered bacteria comprise sequence for encoding an adenosine transporter. In certain embodiments, genetically engineered bacteria comprise sequence for encoding E. coli Nucleoside Permease nupG or nupC. In any of these embodiments, the genetically engineered bacterium is bacterium for intratumoral administration. In some embodiments, the genetically engineered bacterium comprises sequence for encoding a nucleoside transporter or an adenosine transporter, e.g., nupG or nupC transporter sequence, under the control of a promoter that is activated by low-oxygen conditions. In some embodiments, the genetically engineered bacterium comprises sequence for encoding a nucleoside transporter or an adenosine transporter, e.g., nupG or nupC transporter sequence, under the control of a promoter that is activated by hypoxic conditions, or by inflammatory conditions, such as any of the promoters activated by said conditions and described herein. In some embodiments, the genetically engineered bacteria comprises sequence for encoding a nucleoside transporter or an adenosine transporter, e.g., nupG or nupC transporter sequence, under the control of a cancer-specific promoter, a tissue-specific promoter, or a constitutive promoter, such as any of the promoters described herein.

[0637] In some embodiments, the genetically engineered bacteria comprise a means for metabolizing or degrading adenosine. In some embodiments, the genetically engineered bacteria comprise one or more gene sequences encoding one or more enzymes that are capable of converting adenosine to urate (See FIG. 1, FIG. 2, and FIG. 3). In some embodiments, the genetically engineered bacteria comprise sequence(s) encoding add, xapA, deoD, xdhA, xdhB, and xdhC genes from E. coli. In some embodiments, the genetically engineered bacteria comprise sequence(s) encoding add, xapA, deoD, xdhA, xdhB, and xdhC genes from E. coli and comprise sequence encoding a nucleoside or adenosine transporter. In some embodiments, the genetically engineered bacteria comprise sequence(s) encoding add, xapA, deoD, xdhA, xdhB, and xdhC genes from E. coli and comprise sequence encoding nupG or nupC. An exemplary engineered bacteria is shown in FIG. 2.

[0638] Exemplary sequences useful for adenosine degradation circuits include SEQ ID NO: 71-77.

[0639] In some embodiments, genetically engineered bacteria comprise a nucleic acid sequence encoding an adenosine degradation enzyme or adenosine transporter that has at least about 80% identity with one or more polynucleotide sequences selected from SEQ ID NO: 71, SEQ ID NO: 72, SEQ ID NO: 73, SEQ ID NO: 74, SEQ ID NO: 75, SEQ ID NO: 76, and/or SEQ ID NO: 77, or a functional fragment thereof. In some embodiments, genetically engineered bacteria comprise a nucleic acid sequence encoding an adenosine degradation enzyme or adenosine transporter that has at least about 90% identity with one or more polynucleotide sequences selected from SEQ ID NO: 71, SEQ ID NO: 72, SEQ ID NO: 73, SEQ ID NO: 74, SEQ ID NO: 75, SEQ ID NO: 76, and/or SEQ ID NO: 77, or a functional fragment thereof. In some embodiments, genetically engineered bacteria comprise a nucleic acid sequence encoding an adenosine degradation enzyme or adenosine transporter that has at least about 95% identity with one or more polynucleotide sequences selected from SEQ ID NO: 71, SEQ ID NO: 72, SEQ ID NO: 73, SEQ ID NO: 74, SEQ ID NO: 75, SEQ ID NO: 76, and/or SEQ ID NO: 77, or a functional fragment thereof. In some embodiments, genetically engineered bacteria comprise a nucleic acid sequence encoding an adenosine degradation enzyme or adenosine transporter that is at least about 80%, at least about 85%, at least about 90%, at least about 95%, or at least about 99% homologous to one or more polynucleotide sequences selected from SEQ ID NO: 71, SEQ ID NO: 72, SEQ ID NO: 73, SEQ ID NO: 74, SEQ ID NO: 75, SEQ ID NO: 76, and/or SEQ ID NO: 77. In some embodiments, genetically engineered bacteria comprise a nucleic acid sequence encoding an adenosine degradation enzyme or adenosine transporter that comprises one or more polynucleotide sequences selected from SEQ ID NO: 71, SEQ ID NO: 72, SEQ ID NO: 73, SEQ ID NO: 74, SEQ ID NO: 75, SEQ ID NO: 76, and/or SEQ ID NO: 77. In some embodiments, genetically engineered bacteria comprise a nucleic acid sequence encoding an adenosine degradation enzyme or adenosine transporter that consists of one or more polynucleotide sequences selected from SEQ ID NO: 71, SEQ ID NO: 72, SEQ ID NO: 73, SEQ ID NO: 74, SEQ ID NO: 75, SEQ ID NO: 76, and/or SEQ ID NO: 77.

[0640] In some embodiments, genetically engineered bacteria comprise a nucleic acid sequence encoding an adenosine degradation enzyme or adenosine transporter that, but for the redundancy of the genetic code, encodes the same protein as a sequence selected from SEQ ID NO: 71, SEQ ID NO: 72, SEQ ID NO: 73, SEQ ID NO: 74, SEQ ID NO: 75, SEQ ID NO: 76, and/or SEQ ID NO: 77. In some embodiments, the genetically engineered bacteria comprise a nucleic acid encoding an adenosine degradation enzyme or adenosine transporter that, but for the redundancy of the genetic code, encodes a polypeptide that is at least about 80%, to the polypeptide encoded by a sequence selected from SEQ ID NO: 71, SEQ ID NO: 72, SEQ ID NO: 73, SEQ ID NO: 74, SEQ ID NO: 75, SEQ ID NO: 76, and/or SEQ ID NO: 77, or a functional fragment thereof.

[0641] In some embodiments, the genetically engineered bacteria comprise a nucleic acid encoding an adenosine degradation enzyme or adenosine transporter that, but for the redundancy of the genetic code, encodes a polypeptide that is at least about 90% homologous to the polypeptide encoded by a sequence selected from SEQ ID NO: 71, SEQ ID NO: 72, SEQ ID NO: 73, SEQ ID NO: 74, SEQ ID NO: 75, SEQ ID NO: 76, and/or SEQ ID NO: 77, or a functional fragment thereof.

[0642] In some embodiments, the genetically engineered bacteria comprise a nucleic acid encoding an adenosine degradation enzyme or adenosine transporter that, but for the redundancy of the genetic code, encodes a polypeptide that is at least about 95%, homologous to the polypeptide encoded by a sequence selected from SEQ ID NO: 71, SEQ ID NO: 72, SEQ ID NO: 73, SEQ ID NO: 74, SEQ ID NO: 75, SEQ ID NO: 76, and/or SEQ ID NO: 77, or a functional fragment thereof. In some embodiments, the genetically engineered bacteria comprise a nucleic acid encoding an adenosine degradation enzyme or adenosine transporter that, but for the redundancy of the genetic code, encodes a polypeptide that is at least about 80%, at least about 85%, at least about 90%, at least about 95%, or at least about 99% homologous to the polypeptide encoded by a sequence selected from SEQ ID NO: 71, SEQ ID NO: 72, SEQ ID NO: 73, SEQ ID NO: 74, SEQ ID NO: 75, SEQ ID NO: 76, and/or SEQ ID NO: 77.

[0643] In one specific embodiment, the genetically engineered bacteria comprise PfnrS-nupC integrated into the chromosome at HA1/2 (agaI/rsmI) region, PfnrS-xdhABC, integrated into the chromosome at HA9/10 (exo/cea) region, and PfnrS-add-xapA-deoD integrated into the chromosome at malE/K region.

[0644] In some embodiments, constructs comprise PfnrS (SEQ ID NO: 856), PfnrS-nupC (SEQ ID NO: 857), PfnrS-xdhABC (SEQ ID NO: 858), xdhABC (SEQ ID NO: 859), PfnrS-add-xapA-deoD (SEQ ID NO: 860), and add-xapA-deoD (SEQ ID NO: 861).

[0645] In some embodiments, genetically engineered bacteria comprise a nucleic acid sequence encoding an adenosine consuming construct that is at least about 80%, at least about 85%, at least about 90%, at least about 95%, or at least about 99% homologous to the a polynucleotide sequence selected from SEQ ID NO: 856, SEQ ID NO: 857, SEQ ID NO: 858, SEQ ID NO: 859, SEQ ID NO: 860, and/or SEQ ID NO: 861, or a variant or functional fragment thereof. In some embodiments, genetically engineered bacteria comprise a nucleic acid sequence encoding an adenosine consuming construct comprising one or more polynucleotide sequence(s) selected from SEQ ID NO: 856, SEQ ID NO: 857, SEQ ID NO: 858, SEQ ID NO: 859, SEQ ID NO: 860, and/or SEQ ID NO: 861. In some embodiments, genetically engineered bacteria comprise a nucleic acid sequence encoding an adenosine consuming construct consisting of one or more a polynucleotide sequence(s) selected from SEQ ID NO: 856, SEQ ID NO: 857, SEQ ID NO: 858, SEQ ID NO: 859, SEQ ID NO: 860, and/or SEQ ID NO: 861.

[0646] In some embodiments, genetically engineered bacteria comprise a nucleic acid sequence encoding an NupC. In one embodiment, the nucleic acid sequence encodes a NupC polypeptide, which has at least about 80% identity with SEQ ID NO: 78. In one embodiment, the nucleic acid sequence encodes a NupC polypeptide, which has at least about 90% identity with SEQ ID NO: 78. In another embodiment, the nucleic acid sequence encodes a NupC polypeptide, which has at least about 95% identity with SEQ ID NO: 78. Accordingly, in one embodiment, the nucleic acid sequence encodes a NupC polypeptide, which has at least about 85%, 86%, 87%, 88%, 89%, 90%, 91%, 92%, 93%, 94%, 95%, 96%, 97%, 98%, or 99% identity with SEQ ID NO: 78. In another embodiment, the nucleic acid sequence encodes a NupC polypeptide, which comprises a sequence which encodes SEQ ID NO: 78. In yet another embodiment, the nucleic acid sequence encodes a NupC polypeptide, which consists of SEQ ID NO: 78.

[0647] In some embodiments, genetically engineered bacteria comprise a nucleic acid sequence encoding XdhA. In one embodiment, the nucleic acid sequence encodes a XdhA polypeptide, which has at least about 80% identity with SEQ ID NO: 79. In one embodiment, the nucleic acid sequence encodes a XdhA polypeptide, which has at least about 90% identity with SEQ ID NO: 79. In another embodiment, the nucleic acid sequence encodes a XdhA polypeptide, which has at least about 95% identity with SEQ ID NO: 79. Accordingly, in one embodiment, the nucleic acid sequence encodes a XdhA polypeptide, which has at least about 85%, 86%, 87%, 88%, 89%, 90%, 91%, 92%, 93%, 94%, 95%, 96%, 97%, 98%, or 99% identity with SEQ ID NO: 79. In another embodiment, the nucleic acid sequence encodes a XdhA polypeptide, which comprises a sequence which encodes SEQ ID NO: 79. In yet another embodiment, the nucleic acid sequence encodes a XdhA polypeptide, which consists of a sequence which encodes SEQ ID NO: 79.

[0648] In some embodiments, genetically engineered bacteria comprise a nucleic acid sequence encoding XdhB. In one embodiment, the nucleic acid sequence encodes a XdhB polypeptide, which has at least about 80% identity with SEQ ID NO: 80. In one embodiment, the nucleic acid sequence encodes a XdhB polypeptide, which has at least about 90% identity with SEQ ID NO: 80. In another embodiment, the nucleic acid sequence encodes a XdhB polypeptide, which has at least about 95% identity with SEQ ID NO: 80. Accordingly, in one embodiment, the nucleic acid sequence encodes a XdhB polypeptide, which has at least about 85%, 86%, 87%, 88%, 89%, 90%, 91%, 92%, 93%, 94%, 95%, 96%, 97%, 98%, or 99% identity with SEQ ID NO: 80. In another embodiment, the nucleic acid sequence encodes a XdhB polypeptide, which comprises a sequence which encodes SEQ ID NO: 80. In yet another embodiment, the nucleic acid sequence encodes a XdhB polypeptide, which consists of a sequence which encodes SEQ ID NO: 80.

[0649] In some embodiments, genetically engineered bacteria comprise a nucleic acid sequence encoding XdhC. In one embodiment, the nucleic acid sequence encodes a XdhC polypeptide, which has at least about 80% identity with SEQ ID NO: 81. In one embodiment, the nucleic acid sequence encodes a XdhC polypeptide, which has at least about 90% identity with SEQ ID NO: 81. In another embodiment, the nucleic acid sequence encodes a XdhC polypeptide, which has at least about 95% identity with SEQ ID NO: 81. Accordingly, in one embodiment, the nucleic acid sequence encodes a XdhC polypeptide, which has at least about 85%, 86%, 87%, 88%, 89%, 90%, 91%, 92%, 93%, 94%, 95%, 96%, 97%, 98%, or 99% identity with SEQ ID NO: 81. In another embodiment, the nucleic acid sequence encodes a XdhC polypeptide, which comprises a sequence which encodes SEQ ID NO: 81. In yet another embodiment, the nucleic acid sequence encodes a XdhC polypeptide, which consists of a sequence which encodes SEQ ID NO: 81.

[0650] In some embodiments, genetically engineered bacteria comprise a nucleic acid sequence encoding Add. In one embodiment, the nucleic acid sequence encodes a Add polypeptide, which has at least about 80% identity with SEQ ID NO: 82. In one embodiment, the nucleic acid sequence encodes a Add polypeptide, which has at least about 90% identity with SEQ ID NO: 82. In another embodiment, the nucleic acid sequence encodes a Add polypeptide, which has at least about 95% identity with SEQ ID NO: 82. Accordingly, in one embodiment, the nucleic acid sequence encodes a Add polypeptide, which has at least about 85%, 86%, 87%, 88%, 89%, 90%, 91%, 92%, 93%, 94%, 95%, 96%, 97%, 98%, or 99% identity with SEQ ID NO: 82. In another embodiment, the nucleic acid sequence encodes a Add polypeptide, which comprises a sequence which encodes SEQ ID NO: 82. In yet another embodiment, the nucleic acid sequence encodes a Add polypeptide, which consists of a sequence which encodes SEQ ID NO: 82.

[0651] In some embodiments, genetically engineered bacteria comprise a nucleic acid sequence encoding XapA. In one embodiment, the nucleic acid sequence encodes a XapA polypeptide, which has at least about 80% identity with SEQ ID NO: 83. In one embodiment, the nucleic acid sequence encodes a XapA polypeptide, which has at least about 90% identity with SEQ ID NO: 83. In another embodiment, the nucleic acid sequence encodes a XapA polypeptide, which has at least about 95% identity with SEQ ID NO: 83. Accordingly, in one embodiment, the nucleic acid sequence encodes a XapA polypeptide, which has at least about 85%, 86%, 87%, 88%, 89%, 90%, 91%, 92%, 93%, 94%, 95%, 96%, 97%, 98%, or 99% identity with SEQ ID NO: 83. In another embodiment, the nucleic acid sequence encodes a XapA polypeptide, which comprises a sequence which encodes SEQ ID NO: 83. In yet another embodiment, the nucleic acid sequence encodes a XapA polypeptide, which consists of a sequence which encodes SEQ ID NO: 83.

[0652] In some embodiments, genetically engineered bacteria comprise a nucleic acid sequence encoding DeoD. In one embodiment, the nucleic acid sequence encodes a DeoD polypeptide, which has at least about 80% identity with SEQ ID NO: 84. In one embodiment, the nucleic acid sequence encodes a DeoD polypeptide, which has at least about 90% identity with SEQ ID NO: 84. In another embodiment, the nucleic acid sequence encodes a DeoD polypeptide, which has at least about 95% identity with SEQ ID NO: 84. Accordingly, in one embodiment, the nucleic acid sequence encodes a DeoD polypeptide, which has at least about 85%, 86%, 87%, 88%, 89%, 90%, 91%, 92%, 93%, 94%, 95%, 96%, 97%, 98%, or 99% identity with SEQ ID NO: 84. In another embodiment, the nucleic acid sequence encodes a DeoD polypeptide, which comprises a sequence which encodes SEQ ID NO: 84. In yet another embodiment, the nucleic acid sequence encodes a DeoD polypeptide, which consists of a sequence which encodes SEQ ID NO: 84.

[0653] In any of these embodiments, the bacteria genetically engineered to consume adenosine consume 0% to 2% to 4%, 4% to 6%,6% to 8%, 8% to 10%, 10% to 12%, 12% to 14%, 14% to 16%, 16% to 18%, 18% to 20%, 20% to 25%,25% to 30%, 30% to 35%, 35% to 40%,40% to 45% 45% to 50%, 50% to 55%, 55% to 60%, 60% to 65%, 65% to 70% to 80%, 80% to 90%, or 90% to 100% more adenosine than unmodified bacteria of the same bacterial subtype under the same conditions. In yet another embodiment, the genetically engineered bacteria consume 1.0-1.2-fold, 1.2-1.4-fold, 1.4-1.6-fold, 1.6-1.8-fold, 1.8-2-fold, or two-fold more adenosine than unmodified bacteria of the same bacterial subtype under the same conditions. In yet another embodiment, the genetically engineered bacteria consume about three-fold, four-fold, five-fold, six-fold, seven-fold, eight-fold, nine-fold, ten-fold, fifteen-fold, twenty-fold, thirty-fold, forty-fold, fifty-fold, hundred-fold, five hundred-fold, or one-thousand-fold more adenosine than unmodified bacteria of the same bacterial subtype under the same conditions.

[0654] In any of these embodiments, the bacteria genetically engineered to consume adenosine produce at least about 0% to 2% to 4%, 4% to 6%,6% to 8%, 8% to 10%, 10% to 12%, 12% to 14%, 14% to 16%, 16% to 18%, 18% to 20%, 20% to 25%,25% to 30%, 30% to 35%, 35% to 40%,40% to 45% 45% to 50%, 50% to 55%, 55% to 60%, 60% to 65%, 65% to 70% to 80%, 80% to 90%, or 90% to 100% more urate than unmodified bacteria of the same bacterial subtype under the same conditions. In yet another embodiment, the genetically engineered bacteria produce at least about 1.0-1.2-fold, 1.2-1.4-fold, 1.4-1.6-fold, 1.6-1.8-fold, 1.8-2-fold, or two-fold more urate than unmodified bacteria of the same bacterial subtype under the same conditions. In yet another embodiment, the genetically engineered bacteria produce about three-fold, four-fold, five-fold, six-fold, seven-fold, eight-fold, nine-fold, ten-fold, fifteen-fold, twenty-fold, thirty-fold, forty-fold, or fifty-fold, hundred-fold, five hundred-fold, or one-thousand-fold more urate than unmodified bacteria of the same bacterial subtype under the same conditions.

[0655] In any of these embodiments, the genetically engineered bacteria increase the adenosine degradation rate by 0% to 2% to 4%, 4% to 6%,6% to 8%, 8% to 10%, 10% to 12%, 12% to 14%, 14% to 16%, 16% to 18%, 18% to 20%, 20% to 25%,25% to 30%, 30% to 35%, 35% to 40%,40% to 45% 45% to 50%, 50% to 55%, 55% to 60%, 60% to 65%, 65% to 70% to 80%, 80% to 90%, or 90% to 100% relative to unmodified bacteria of the same bacterial subtype under the same conditions. In yet another embodiment, the genetically engineered bacteria increase the adenosine degradation rate by 1.0-1.2-fold, 1.2-1.4-fold, 1.4-1.6-fold, 1.6-1.8-fold, 1.8-2-fold, or two-fold more relative to unmodified bacteria of the same bacterial subtype under the same conditions. In yet another embodiment, the genetically engineered bacteria increase the degradation rate by about three-fold, four-fold, five-fold, six-fold, seven-fold, eight-fold, nine-fold, ten-fold, fifteen-fold, twenty-fold, thirty-fold, forty-fold, or fifty-fold, hundred-fold, five hundred-fold, or one-thousand-fold relative to unmodified bacteria of the same bacterial subtype under the same conditions.

[0656] In some embodiments, the genetically engineered bacteria have an adenosine degradation rate of about 1.8-10 umol/hr/10\hat{ }9 cells when induced under low oxygen conditions. In one specific embodiment, the genetically engineered bacteria have an adenosine degradation rate of about 5-9 umol/hr/10\hat{ }9 cells. In one specific embodiment, the genetically engineered bacteria have an adenosine degradation rate of about 6-8 umol/hr/10\hat{ }9 cells.

[0657] In one embodiment, the genetically engineered bacteria increase the adenosine degradation by about 50% to 70% relative to unmodified bacteria of the same bacterial subtype under the same conditions, i.e., when induced under low oxygen conditions, after 1 hour. In one embodiment, the genetically engineered bacteria increase the adenosine degradation by about 55% to 65% relative to unmodified bacteria of the same bacterial subtype under the same conditions, i.e., when induced under low oxygen conditions after 1 hour. In one specific embodiment, the genetically engineered bacteria increase the adenosine degradation by about 55% to 60% relative to unmodified bacteria of the same bacterial subtype under the same conditions, i.e., when induced under low oxygen conditions, after 1 hour. In yet another embodiment, the genetically engineered bacteria increase the adenosine degradation by about 1.5-3 fold when induced under low oxygen conditions, after 1 hour. In one specific embodiment, the genetically engineered bacteria increase the adenosine degradation by about 2-2.5 fold when induced under low oxygen conditions, after 1 hour.

[0658] In one embodiment, the genetically engineered bacteria increase the adenosine degradation by about 85% to 100% relative to unmodified bacteria of the same bacterial subtype under the same conditions, i.e., when induced under low oxygen conditions, after 2 hours. In one embodiment, the genetically engineered bacteria increase the adenosine degradation by about 95% to 100% relative to unmodified bacteria of the same bacterial subtype under the same conditions, i.e., when induced under low oxygen conditions after 2 hours. In one specific embodiment, the genetically engineered bacteria increase the adenosine degradation by about 97% to 99% relative to unmodified bacteria of the same bacterial subtype under the same conditions, i.e., when induced under low oxygen conditions, after 2 hours.

[0659] In yet another embodiment, the genetically engineered bacteria increase the adenosine degradation by about 40-50 fold when induced under low oxygen conditions, after 2 hours. In one specific embodiment, the genetically engineered bacteria increase the adenosine degradation by about 44-48 fold when induced under low oxygen conditions, after 2 hours.

[0660] In one embodiment, the genetically engineered bacteria increase the adenosine degradation by about 95% to 100% relative to unmodified bacteria of the same bacterial subtype under the same conditions, i.e., when induced under low oxygen conditions, after 3 hours. In one embodiment, the genetically engineered bacteria increase the adenosine degradation by about 98% to 100% relative to unmodified bacteria of the same bacterial subtype under the same conditions, i.e., when induced under low oxygen conditions after 3 hours. In one specific embodiment, the genetically engineered bacteria increase the adenosine degradation by about 99% to 99% relative to unmodified bacteria of the same bacterial subtype under the same conditions, i.e., when induced under low oxygen conditions, after 3 hours. In yet another embodiment, the genetically engineered bacteria increase the adenosine degradation by about 100-1000 fold when induced under low oxygen conditions, after 3 hours. In yet another embodiment, the genetically engineered bacteria increase the adenosine degradation by about 1000-10000 fold when induced under low oxygen conditions, after 3 hours.

[0661] In one embodiment, the genetically engineered bacteria increase the adenosine degradation by about 95% to 100% relative to unmodified bacteria of the same bacterial subtype under the same conditions, i.e., when induced under low oxygen conditions, after 4 hours. In one embodiment, the genetically engineered bacteria increase the adenosine degradation by about 98% to 100% relative to unmodified bacteria of the same bacterial subtype under the same conditions, i.e., when induced under low oxygen conditions after 4 hours. In one embodiment, the genetically engineered bacteria increase the adenosine degradation by about 99% to 99% relative to unmodified bacteria of the same bacterial subtype under the same conditions, i.e., when induced under low oxygen conditions, after 4 hours. In yet another embodiment, the genetically engineered bacteria increase the adenosine degradation by about 100-1000 fold when induced under low oxygen conditions, after 4 hours. In yet another embodiment, the genetically engineered bacteria increase the adenosine degradation by about 1000-10000 fold when induced under low oxygen conditions, after 4 hours.

[0662] In any of these embodiments, the genetically engineered bacteria are capable of reducing cell proliferation by at least about 10% to 20%, 20% to 25%, 25% to 30%, 30% to 40%, 40% to 50%, 50% to 60%, 60% to 70%, 70% to 75%, 75% to 80%, 80% to 85%, 85% to 90%, 90% to 95%, 95% to 99%, or more as compared to an unmodified bacteria of the same subtype under the same conditions. In any of these embodiments, the genetically engineered bacteria are capable of reducing tumor growth by at least about 10% to 20%, 20% to 25%, 25% to 30%, 30% to 40%, 40% to 50%, 50% to 60%, 60% to 70%, 70% to 75%, 75% to 80%, 80% to 85%, 85% to 90%, 90% to 95%, 95% to 99%, or more as compared to an unmodified bacteria of the same subtype under the same conditions. In any of these embodiments, the genetically engineered bacteria are capable of reducing tumor size by at least about 10% to 20%, 20% to 25%, 25% to 30%, 30% to 40%, 40% to 50%, 50% to 60%, 60% to 70%, 70% to 75%, 75% to 80%, 80% to 85%, 85% to 90%, 90% to 95%, 95% to 99%, or more as compared to an unmodified bacteria of the same subtype under the same conditions. In any of these embodiments, the genetically engineered bacteria are capable of reducing tumor volume by at least about 10% to 20%, 20% to 25%, 25% to 30%, 30% to 40%, 40% to 50%, 50% to 60%, 60% to 70%, 70% to 75%, 75% to 80%, 80% to 85%, 85% to 90%, 90% to 95%, 95% to 99%, or more as compared to an unmodified bacteria of the same subtype under the same conditions. In any of these embodiments, the genetically engineered bacteria are capable of reducing tumor weight by at least about 10% to 20%, 20% to 25%, 25% to 30%, 30% to 40%, 40% to 50%, 50% to 60%, 60% to 70%, 70% to 75%, 75% to 80%, 80% to 85%, 85% to 90%, 90% to 95%, 95% to 99%, or more as compared to an unmodified bacteria of the same subtype under the same conditions.

[0663] In some embodiments, the genetically engineered microorganisms are capable of expressing any one or more of the described circuits for the degradation of adenosine in low-oxygen conditions, and/or in the presence of cancer and/or the tumor microenvironment, or tissue specific molecules or metabolites, and/or in the presence of molecules or metabolites associated with inflammation or immune suppression, and/or in the presence of metabolites that may be present in the gut, and/or in the presence of metabolites that may or may not be present in vivo, and may be present in vitro during strain culture, expansion, production and/or manufacture, such as arabinose, cumate, and salicylate and others described herein. In some embodiments such an inducer may be administered in vivo to induce effector gene expression. In some embodiments, the gene sequences(s) encoding circuitry for the degradation of adenosine are controlled by a promoter inducible by such conditions and/or inducers. In some embodiments, the gene sequences(s) are controlled by a constitutive promoter, as described herein. In some embodiments, the gene sequences(s) are controlled by a constitutive promoter, and are expressed in in vivo conditions and/or in vitro conditions, e.g., during expansion, production and/or manufacture, as described herein. In some embodiments, any one or more of the described adenosine degradation circuits are present on one or more plasmids (e.g., high copy or low copy) or are integrated into one or more sites in the microorganismal chromosome.

[0664] In any of these embodiments, the genetically engineered bacteria comprising gene sequence(s) encoding adenosine catabolic pathways and adenosine transporters described herein, further comprise gene sequence(s) encoding one or more further effector molecule(s), i.e., therapeutic molecule(s) or a metabolic converter(s). In any of these embodiments, the circuit encoding adenosine catabolic pathways and adenosine transporters, may be combined with a circuit encoding one or more immune initiators or immune sustainers as described herein, in the same or a different bacterial strain (combination circuit or mixture of strains). The circuit encoding the immune initiators or immune sustainers may be under the control of a constitutive or inducible promoter, e.g., low oxygen inducible promoter or any other constitutive or inducible promoter described herein.

[0665] In any of these embodiments, the gene sequence(s) encoding adenosine catabolic pathways and adenosine transporters, may be combined with gene sequence(s) encoding one or more STING agonist producing enzymes, as described herein, in the same or a different bacterial strain (combination circuit or mixture of strains). In some embodiments, the gene sequences which are combined with the gene sequence(s) encoding adenosine catabolic pathways and adenosine transporters, encode DacA. DacA may be under the control of a constitutive or inducible promoter, e.g., low oxygen inducible promoter such as FNR or any other constitutive or inducible promoter described herein. In some embodiments, the dacA gene is integrated into the chromosome. In some embodiments, the gene sequences which are combined with the gene sequence(s) encoding adenosine catabolic pathways and adenosine transporters, encode cGAS. cGAS may be under the control of a constitutive or inducible promoter, e.g., low oxygen inducible promoter such as FNR or any other constitutive or inducible promoter described herein. In some embodiments, the gene encoding cGAS is integrated into the chromosome. In any of these combination embodiments, the bacteria may further comprise an auxotrophic modification, e.g., a mutation or deletion in DapA, ThyA, or both. In any of these embodiments, the bacteria may further comprise a phage modification, e.g., a mutation or deletion, in an endogenous prophage as described herein.

[0666] Also, in some embodiments, the genetically engineered microorganisms are capable of expressing any one or more of the described circuits and further comprise one or more of the following: (1) one or more auxotrophies, such as any auxotrophies known in the art and provided herein, e.g., thyA auxotrophy, (2) one or more kill switch circuits, such as any of the kill-switches described herein or otherwise known in the art, (3) one or more antibiotic resistance circuits, (4) one or more transporters for importing biological molecules or substrates, such any of the transporters described herein or otherwise known in the art, (5) one or more secretion circuits, such as any of the secretion circuits described herein and otherwise known in the art, (6) one or more surface display circuits, such as any of the surface display circuits described herein and otherwise known in the art and (7) one or more circuits for the production or degradation of one or more metabolites (e.g., kynurenine, tryptophan, adenosine, arginine) described herein (8) combinations of one or more of such additional circuits. In any of these embodiments, the genetically engineered bacteria may be administered alone or in combination with one or more immune checkpoint inhibitors described herein, including but not limited anti-CTLA4, anti-PD1, or anti-PD-L1 antibodies.

[0667] In some embodiments, the genetically engineered bacteria comprise a means for increasing the level of ATP in the tumor microenvironment, e.g., by increasing the production and secretion of ATP from the microorganism. In some embodiments, the genetically engineered bacteria comprise one or more means for reducing the levels of adenosine in the tumor microenvironment (e.g., by increasing the uptake of adenosine, by metabolizing and/or degrading adenosine), increasing the levels of ATP in the tumor microenvironment, and/or preventing or blocking the conversion of ATP to adenosine in the tumor microenvironment. In any of these embodiments, the genetically engineered bacterium is bacterium for intratumoral administration. In some embodiments, the genetically engineered bacterium comprises one or more genes for metabolizing adenosine, under the control of a promoter that is activated by low-oxygen conditions, by hypoxic conditions, or by inflammatory conditions, such as any of the promoters activated by said conditions and described herein. In some embodiments, the genetically engineered bacteria expresses one or more genes for metabolizing adenosine under the control of a cancer-specific promoter, a tissue-specific promoter, or a constitutive promoter, such as any of the promoters described herein.

### Arginine/Arginase I Metabolism

[0668] L-Arginine (L-Arg) is a nonessential amino acid that plays a central role in several biological systems including the immune response. L-Arginine is metabolized by arginase I, arginase II, and the inducible nitric oxide synthase. Arginase 1 hydrolyzes L-Arginine into urea and L-ornithine, the latter being the main substrate for the production of polyamines that are required for rapid cell cycle progression in malignancies. A distinct subpopulation of tumor-infiltrating myeloid-derived suppressor cells (MDSC), and not tumor cells themselves, have been shown to produce high levels of arginase I and cationic amino acid transporter 2B, which allow them to rapidly incorporate L-Arginine (L-Arg) and deplete extracellular L-Arg the tumor microenvironment. These cells are potent inhibitors of T-cell receptor expression and antigen-specific T-cell responses and potent inducers of regulatory T cells. Moreover, recent studies by Lanzavecchia and co-workers have shown that activated T cells also heavily consume L-arginine and rapidly convert it into downstream metabolites, which lead to a marked decrease in intracellular arginine levels after activation. In these studies, addition of exogenous L-arginine to T cell culture medium increased intracellular levels of free L-arginine in T cells, and moreover increased L-arginine levels caused pleiotropic effects on T cell activation, differentiation, and function, ranging from increased bioenergetics and survival to in vivo anti-tumor activity (Geiger et al., (2016) L-Arginine Modulates T Cell Metabolism and Enhances Survival and Anti-tumor Activity; Cell 167, 829-842, the contents of which is herein incorporated by reference in its entirety). Accordingly, bacteria engineered to produce and secrete arginine may be capable of promoting arginine uptake by T cells, leading to enhanced and more sustained T cell activation. Accordingly, in some embodiments, the genetically engineered bacteria of the disclosure are capable of producing arginine.

[0669] Recent findings suggest that the tumor microenvironment has a unique type of ammonia metabolism that is different from any other organ in the human body (Spinelli et al., Metabolic recycling of ammonia via glutamate dehydrogenase supports breast cancer biomass; Science 10.1126/science.aam9305 (2017)) Ammonia, which accumulates in the tumor microenvironment because tumors are poorly vascularized, is not a waste product but instead uniquely allows the tumor to reassimilate this ammonia as an important nitrogen source into metabolic pathways to support the high demand for amino acid synthesis in rapidly proliferating cancer cells. Additionally, Eng et al. (Eng et al., Ammonia Derived from Glutaminolysis Is a Diffusible Regulator of Autophagy; Science Signaling (2010); 3(118)ra31) found that ammonia liberated during glutaminolysis stimulates autophagy, which promotes cell fitness by recycling macromolecules into metabolic precursors needed for survival in rapidly proliferating cells. The authors propose that the liberation of ammonia from tumor cells engaged in glutaminolysis provides signal that promotes autophagy and, in turn, protects cells in different regions of the tumor from internally generated or environmental stress.

[0670] Accordingly, consumption of ammonia by the genetically engineered bacteria may reduce availability of ammonia for cancer metabolism or the promotion of autophagy in cancer cells. The disclosure described herein further provides genetically engineered bacteria that are capable of reducing excess ammonia and converting ammonia and/or nitrogen into alternate byproducts. In certain embodiments, the genetically engineered bacteria reduce excess ammonia and convert ammonia and/or nitrogen into alternate byproducts in the tumor microenvironment. In certain embodiments, the genetically engineered bacteria reduce excess ammonia by incorporating excess nitrogen in the tumor into molecules which reduce nitrogen availability to the tumor, e.g., arginine, citrulline, methionine, histidine, lysine, asparagine, glutamine, or tryptophan. In some embodiments, the genetically engineered bacteria reduce excess ammonia by incorporating excess nitrogen in the tumor into molecules which inhibit tumor growth or promote T cell activation, including, but not limited to, arginine. In some embodiments, the genetically engineered bacteria are capable of consuming ammonia and producing arginine.

[0671] In the arginine production circuit described herein below and in more detail in PCT/US2016/034200, filed May 25, 2016 and Ser. No. 15/164,828 filed May 25, 2016, published as US20160333326, and PCT/US2015/064140, filed Dec. 4, 2015, and U.S. Pat. No. 9,487,764, filed Dec. 4, 2015, ammonia is taken up by a bacterium (e.g., E. coli Nissle), converted to glutamate, and glutamate is subsequently metabolized to arginine. Arginine then ultimately exits the bacterial cell. As such this circuit is suitable for the consumption of ammonia, reducing ammonia availability to the cancer cells in the tumor, and at the same time producing arginine, which promotes T cell activation and prevents immune suppression.

[0672] In some embodiments, the genetically engineered bacteria that produce L-Arginine and/or consume ammonia comprise one or more gene sequences encoding one or more enzymes of the L-Arginine biosynthetic pathway. In some embodiments, the genetically engineered bacteria comprise one or more gene sequences encoding one or more enzymes that are capable of incorporating ammonia into glutamate, and converting glutamate to arginine. In some embodiments, the genetically engineered bacteria comprise an Arginine operon. In some embodiments, the genetically engineered bacteria comprise the Arginine operon of E. coli. In some embodiments, the genetically engineered bacteria comprise the Arginine operon of another bacteria. In any of these embodiments, the arginine repressor (ArgR) optionally may be deleted, mutated, or modified so as to diminish or obliterate its repressor function.

[0673] “Arginine operon,” “arginine biosynthesis operon,” and “arg operon” are used interchangeably to refer to a cluster of one or more of the genes encoding arginine biosynthesis enzymes under the control of a shared regulatory region comprising at least one promoter and at least one ARG box. In some embodiments, the one or more genes are co-transcribed and/or co-translated.

[0674] “Mutant arginine regulon” or “mutated arginine regulon” is used to refer to an arginine regulon comprising one or more nucleic acid mutations that reduce or eliminate arginine-mediated repression of each of the operons that encode the enzymes responsible for converting glutamate to arginine in the arginine biosynthesis pathway, such that the mutant arginine regulon produces more arginine and/or intermediate byproduct than an unmodified regulon from the same bacterial subtype under the same conditions.

[0675] In bacteria such as Escherichia coli (E. coli), the arginine biosynthesis pathway is capable of converting glutamate to arginine in an eight-step enzymatic process described in in PCT/US2016/034200, filed May 25, 2016 and Ser. No. 15/164,828 filed May 25, 2016, published as US20160333326, and PCT/US2015/064140, filed Dec. 4, 2015, and U.S. Pat. No. 9,487,764, filed Dec. 4, 2015, the contents of each of which is herein incorporated by reference in its entirety. All of the genes encoding these enzymes are subject to repression by arginine via its interaction with ArgR to form a complex that binds to the regulatory region of each gene and inhibits transcription. N-acetylglutamate synthetase is also subject to allosteric feedback inhibition at the protein level by arginine alone.

[0676] In some engineered bacteria, the arginine regulon includes, but is not limited to, argA, encoding N-acetylglutamate synthetase; argB, encoding N-acetylglutamate kinase; argC, encoding N-acetylglutamylphosphate reductase; argD, encoding acetylornithine aminotransferase; argE, encoding N-acetylornithinase; argG, encoding argininosuccinate synthase; argH, encoding argininosuccinate lyase; one or both of argF and argI, each of which independently encodes ornithine transcarbamylase; carA, encoding the small subunit of carbamoylphosphate synthase; carB, encoding the large subunit of carbamoylphosphate synthase; operons thereof; operators thereof; promoters thereof; ARG boxes thereof; and/or regulatory regions thereof. In some embodiments, the arginine regulon comprises argJ, encoding ornithine acetyltransferase (either in addition to or in lieu of N-acetylglutamate synthetase and/or N-acetylornithinase), operons thereof, operators thereof, promoters thereof, ARG boxes thereof, and/or regulatory regions thereof.

[0677] In some embodiments, the genetically engineered bacteria comprise an arginine biosynthesis pathway and are capable of producing arginine and/or consuming ammonia. In a more specific aspect, the genetically engineered bacteria comprise a mutant arginine regulon in which one or more operons encoding arginine biosynthesis enzyme(s) is derepressed to produce more arginine than unmodified bacteria of the same subtype under the same conditions. In some embodiments, the genetically engineered bacteria overproduce arginine. In some embodiments, the genetically engineered bacteria consume ammonia. In some embodiments, the genetically engineered bacteria overproduce arginine and consume ammonia.

[0678] Each operon is regulated by a regulatory region comprising at least one promoter and at least one ARG box, which control repression and expression of the arginine biosynthesis genes in said operon. In some embodiments, the genetically engineered bacteria comprise an arginine regulon comprising one or more nucleic acid mutations that reduce or eliminate arginine-mediated repression of one or more of the operons that encode the enzymes responsible for converting glutamate to arginine in the arginine biosynthesis pathway. Reducing or eliminating arginine-mediated repression may be achieved by reducing or eliminating ArgR repressor binding (e.g., by mutating or deleting the arginine repressor or by mutating at least one ARG box for each of the operons that encode the arginine biosynthesis enzymes) and/or arginine binding to N-acetylglutamate synthetase (e.g., by mutating the N-acetylglutamate synthetase to produce an arginine feedback resistant N-acetylglutamate synthase mutant, e.g., argAfbr).

[0679] In some embodiments, the reduction or elimination of arginine-mediated repression may be achieved by reducing or eliminating ArgR repressor binding, e.g., by mutating at least one ARG box for one or more of the operons that encode the arginine biosynthesis enzymes or by mutating or deleting the arginine repressor and/or by reducing or eliminating arginine binding to N-acetylglutamate synthetase (e.g., by mutating the N-acetylglutamate synthetase to produce an arginine feedback resistant N-acetylglutamate synthase mutant, e.g., argA′).

[0680] “ArgR” or “arginine repressor” is used to refer to a protein that is capable of suppressing arginine biosynthesis by regulating the transcription of arginine biosynthesis genes in the arginine regulon. Bacteria that “lack any functional ArgR” and “ArgR deletion bacteria” are used to refer to bacteria in which each arginine repressor has significantly reduced or eliminated activity as compared to unmodified arginine repressor from bacteria of the same subtype under the same conditions. ARG box refers to an nucleic acid sequence which comprises a consensus sequence, and which is known to occur with high frequency in one or more of the regulatory regions of argR, argA, argB, argC, argD, argE, argF, argG, argH, argI, argJ, carA, and/or carB.

[0681] In some embodiments, the genetically engineered bacteria comprise a mutant arginine regulon comprising one or more nucleic acid mutations in at least one ARG box for one or more of the operons that encode the arginine biosynthesis enzymes N-acetylglutamate kinase, N-acetylglutamylphosphate reductase, acetylornithine aminotransferase, N-acetylornithinase, ornithine transcarbamylase, argininosuccinate synthase, argininosuccinate lyase, and carbamoylphosphate synthase, such that the arginine regulon is derepressed and biosynthesis of arginine and/or an intermediate byproduct, e.g., citrulline, is enhanced. Such genetically engineered bacteria, mutant Arg boxes and exemplary mutant arginine regulons are described in PCT/US2016/034200, filed May 25, 2016 and Ser. No. 15/164,828 filed May 25, 2016, published as US20160333326, and PCT/US2015/064140, filed Dec. 4, 2015, and U.S. Pat. No. 9,487,764, filed Dec. 4, 2015, the contents of each of which is herein incorporated by reference it its entirety.

[0682] In some embodiments, the genetically engineered bacteria lack a functional ArgR repressor and therefore ArgR repressor-mediated transcriptional repression of each of the arginine biosynthesis operons is reduced or eliminated. Genetically engineered bacteria according to the present disclosure that lack a functional ArgR repressor are described in PCT/US2016/034200, filed May 25, 2016 and Ser. No. 15/164,828 filed May 25, 2016, published as US20160333326, and PCT/US2015/064140, filed Dec. 4, 2015, and U.S. Pat. No. 9,487,764, filed Dec. 4, 2015, the contents of each of which is herein incorporated by reference it its entirety. In some embodiments, the engineered bacteria comprise a mutant arginine repressor comprising one or more nucleic acid mutations such that arginine repressor function is decreased or inactive. In some embodiments, the genetically engineered bacteria do not have an arginine repressor (e.g., the arginine repressor gene has been deleted), resulting in depression of the regulon and enhancement of arginine and/or intermediate byproduct biosynthesis and/or increased ammonia consumption. Bacteria in which arginine repressor activity is reduced or eliminated can be generated by modifying the bacterial argR gene or by modifying the transcription of the argR gene. In some embodiments, each copy of a functional argR gene normally present in a corresponding wild-type bacterium is independently deleted or rendered inactive by one or more nucleotide deletions, insertions, or substitutions or is deleted.

[0683] In some embodiments, the genetically engineered bacteria comprise an arginine feedback resistant N-acetylglutamate synthase mutant, e.g., argA^{fbr} (see, e.g., Eckhardt et al., 1975; Rajagopal et al., 1998). Genetically engineered bacteria according to the present disclosure comprising argAfbr are described in PCT/US2016/034200, filed May 25, 2016 and Ser. No. 15/164,828 filed May 25, 2016, published as US20160333326, and PCT/US2015/064140, filed Dec. 4, 2015, and U.S. Pat. No. 9,487,764, filed Dec. 4, 2015, the contents of each of which is herein incorporated by reference it its entirety. In some embodiments, the genetically engineered bacteria comprise a mutant arginine regulon comprising an arginine feedback resistant ArgA, and when the arginine feedback resistant ArgA is expressed, are capable of producing more arginine and/or an intermediate byproduct than unmodified bacteria of the same subtype under the same conditions. The feedback resistant argA gene can be present on a plasmid or chromosome, e.g., in one or more copies at one or more integration sites. Multiple distinct feedback resistant N-acetylglutamate synthetase proteins are known in the art and may be combined in the genetically engineered bacteria. In some embodiments, the argA gene is expressed under the control of a constitutive promoter. In some embodiments, the argA^{fbr} gene is expressed under the control of a promoter that is induced by tumor microenvironment. In some embodiments, the argA^{fbr} gene is expressed under the control of a promoter that is induced under low oxygen conditions, e.g., an FNR promoter.

[0684] The nucleic acid sequence of an exemplary argAfbr sequence is shown in SEQ ID NO: 102. The polypeptide sequence of an exemplary argAfbr sequence is shown in SEQ ID NO: 103.

[0685] In some embodiments, the genetically engineered bacteria comprise the nucleic acid sequence of SEQ ID NO: 102 or a functional fragment thereof. In some embodiments, the genetically engineered bacteria comprise a nucleic acid sequence that, but for the redundancy of the genetic code, encodes the same polypeptide as SEQ ID NO: 102 or a functional fragment thereof. In some embodiments, genetically engineered bacteria comprise a nucleic acid sequence that is at least about 80%, at least about 85%, at least about 90%, at least about 95%, or at least about 99% homologous to the DNA sequence of SEQ ID NO: 102 or a functional fragment thereof, or a nucleic acid sequence that, but for the redundancy of the genetic code, encodes the same polypeptide as SEQ ID NO: 102 or a functional fragment thereof.

[0686] In some embodiments, the genetically engineered bacteria encode a polypeptide sequence of SEQ ID NO: 103 or a functional fragment thereof. In some embodiments, the genetically engineered bacteria encode a polypeptide sequence encodes a polypeptide, which contains one or more conservative amino acid substitutions relative to SEQ ID NO: 103 or a functional fragment thereof. In some embodiments, genetically engineered bacteria encode a polypeptide sequence that is at least about 80%, at least about 85%, at least about 90%, at least about 95%, or at least about 99% homologous to the DNA sequence of SEQ ID NO: 103 or a functional fragment thereof.

[0687] In some embodiments, arginine feedback inhibition of N-acetylglutamate synthetase is reduced by at least about 50%, at least about 60%, at least about 70%, at least about 80%, at least about 90%, or at least about 95% in the genetically engineered bacteria when the arginine feedback resistant N-acetylglutamate synthetase is active, as compared to a wild-type N-acetylglutamate synthetase from bacteria of the same subtype under the same conditions.

[0688] In some embodiments, the genetically modified bacteria comprising a mutant or deleted arginine repressor additionally comprise an arginine feedback resistant N-acetylglutamate synthase mutant, e.g., argA^{fbr}. In some embodiments, the genetically engineered bacteria comprise a feedback resistant form of ArgA, lack any functional arginine repressor, and are capable of producing arginine. In some embodiments, the argR gene is deleted in the genetically engineered bacteria. In some embodiments, the argR gene is mutated to inactivate ArgR function. In some embodiments, the genetically engineered bacteria comprise argA^{fbr} and deleted ArgR. In some embodiments, the deleted ArgR and/or the deleted argG is deleted from the bacterial genome and the argA^{fbr} is present in a plasmid. In some embodiments, the deleted ArgR is deleted from the bacterial genome and the argA chromosomally integrated.

[0689] In any of these embodiments, the bacteria genetically engineered to produce arginine and/or consume ammonia produce at least about 0% to 2% to 4%, 4% to 6%,6% to 8%, 8% to 10%, 10% to 12%, 12% to 14%, 14% to 16%, 16% to 18%, 18% to 20%, 20% to 25%,25% to 30%, 30% to 35%, 35% to 40%,40% to 45% 45% to 50%, 50% to 55%, 55% to 60%, 60% to 65%, 65% to 70% to 80%, 80% to 90%, or 90% to 100% more arginine than unmodified bacteria of the same bacterial subtype under the same conditions. In yet another embodiment, the genetically engineered bacteria produce at least about 1.0-1.2-fold, 1.2-1.4-fold, 1.4-1.6-fold, 1.6-1.8-fold, 1.8-2-fold, or two-fold more arginine than unmodified bacteria of the same bacterial subtype under the same conditions. In yet another embodiment, the genetically engineered bacteria produce about three-fold, four-fold, five-fold, six-fold, seven-fold, eight-fold, nine-fold, ten-fold, fifteen-fold, twenty-fold, thirty-fold, forty-fold, or fifty-fold, hundred-fold, five hundred-fold, or one-thousand-fold more arginine than unmodified bacteria of the same bacterial subtype under the same conditions.

[0690] In any of these embodiments, the bacteria genetically engineered to produce arginine and or consume ammonia consume 0% to 2% to 4%, 4% to 6%,6% to 8%, 8% to 10%, 10% to 12%, 12% to 14%, 14% to 16%, 16% to 18%, 18% to 20%, 20% to 25%,25% to 30%, 30% to 35%, 35% to 40%,40% to 45% 45% to 50%, 50% to 55%, 55% to 60%, 60% to 65%, 65% to 70% to 80%, 80% to 90%, or 90% to 100% more glutamate than unmodified bacteria of the same bacterial subtype under the same conditions. In yet another embodiment, the genetically engineered bacteria consume 1.0-1.2-fold, 1.2-1.4-fold, 1.4-1.6-fold, 1.6-1.8-fold, 1.8-2-fold, or two-fold more glutamate than unmodified bacteria of the same bacterial subtype under the same conditions. In yet another embodiment, the genetically engineered bacteria consume about three-fold, four-fold, five-fold, six-fold, seven-fold, eight-fold, nine-fold, ten-fold, fifteen-fold, twenty-fold, thirty-fold, forty-fold, fifty-fold, hundred-fold, five hundred-fold, or one-thousand-fold more glutamate than unmodified bacteria of the same bacterial subtype under the same conditions.

[0691] In any of these embodiments, the bacteria genetically engineered to produce arginine and or consume ammonia consume 0% to 2% to 4%, 4% to 6%,6% to 8%, 8% to 10%, 10% to 12%, 12% to 14%, 14% to 16%, 16% to 18%, 18% to 20%, 20% to 25%,25% to 30%, 30% to 35%, 35% to 40%,40% to 45% 45% to 50%, 50% to 55%, 55% to 60%, 60% to 65%, 65% to 70% to 80%, 80% to 90%, or 90% to 100% more ammonia than unmodified bacteria of the same bacterial subtype under the same conditions. In yet another embodiment, the genetically engineered bacteria consume 1.0-1.2-fold, 1.2-1.4-fold, 1.4-1.6-fold, 1.6-1.8-fold, 1.8-2-fold, or two-fold more ammonia than unmodified bacteria of the same bacterial subtype under the same conditions. In yet another embodiment, the genetically engineered bacteria consume about three-fold, four-fold, five-fold, six-fold, seven-fold, eight-fold, nine-fold, ten-fold, fifteen-fold, twenty-fold, thirty-fold, forty-fold, fifty-fold, hundred-fold, five hundred-fold, or one-thousand-fold more ammonia than unmodified bacteria of the same bacterial subtype under the same conditions.

[0692] In any of these embodiments, the genetically engineered bacteria are capable of reducing cell proliferation by at least about 10% to 20%, 20% to 25%, 25% to 30%, 30% to 40%, 40% to 50%, 50% to 60%, 60% to 70%, 70% to 75%, 75% to 80%, 80% to 85%, 85% to 90%, 90% to 95%, 95% to 99%, or more as compared to an unmodified bacteria of the same subtype under the same conditions. In any of these embodiments, the genetically engineered bacteria are capable of reducing tumor growth by at least about 10% to 20%, 20% to 25%, 25% to 30%, 30% to 40%, 40% to 50%, 50% to 60%, 60% to 70%, 70% to 75%, 75% to 80%, 80% to 85%, 85% to 90%, 90% to 95%, 95% to 99%, or more as compared to an unmodified bacteria of the same subtype under the same conditions. In any of these embodiments, the genetically engineered bacteria are capable of reducing tumor size by at least about 10% to 20%, 20% to 25%, 25% to 30%, 30% to 40%, 40% to 50%, 50% to 60%, 60% to 70%, 70% to 75%, 75% to 80%, 80% to 85%, 85% to 90%, 90% to 95%, 95% to 99%, or more as compared to an unmodified bacteria of the same subtype under the same conditions. In any of these embodiments, the genetically engineered bacteria are capable of reducing tumor volume by at least about 10% to 20%, 20% to 25%, 25% to 30%, 30% to 40%, 40% to 50%, 50% to 60%, 60% to 70%, 70% to 75%, 75% to 80%, 80% to 85%, 85% to 90%, 90% to 95%, 95% to 99%, or more as compared to an unmodified bacteria of the same subtype under the same conditions. In any of these embodiments, the genetically engineered bacteria are capable of reducing tumor weight by at least about 10% to 20%, 20% to 25%, 25% to 30%, 30% to 40%, 40% to 50%, 50% to 60%, 60% to 70%, 70% to 75%, 75% to 80%, 80% to 85%, 85% to 90%, 90% to 95%, 95% to 99%, or more as compared to an unmodified bacteria of the same subtype under the same conditions.

[0693] Arginine producing strains and ammonia consuming strains are described in PCT/US2016/034200, filed May 25, 2016 and Ser. No. 15/164,828 filed May 25, 2016, published as US20160333326, and PCT/US2015/064140, filed Dec. 4, 2015, and U.S. Pat. No. 9,487,764, filed Dec. 4, 2015, the contents of each of which is herein incorporated by reference it its entirety.

[0694] In some embodiments, the genetically engineered microorganisms for the production of arginine and or consuming ammonia are capable of expressing any one or more of the described circuits in low-oxygen conditions, and/or in the presence of cancer and/or the tumor microenvironment, or tissue specific molecules or metabolites, and/or in the presence of molecules or metabolites associated with inflammation or immune suppression.

[0695] In some embodiments, any one or more of the described circuits for the production of arginine and or consumption of ammonia are present on one or more plasmids (e.g., high copy or low copy) or are integrated into one or more sites in the microorganismal chromosome. Also, in some embodiments, the genetically engineered microorganisms are further capable of expressing any one or more of the described circuits and further comprise one or more of the following: (1) one or more auxotrophies, such as any auxotrophies known in the art and provided herein, e.g., thyA auxotrophy, (2) one or more kill switch circuits, such as any of the kill-switches described herein or otherwise known in the art, (3) one or more antibiotic resistance circuits, (4) one or more transporters for importing biological molecules or substrates, such any of the transporters described herein or otherwise known in the art, (5) one or more secretion circuits, such as any of the secretion circuits described herein and otherwise known in the art, (6) one or more surface display circuits, such as any of the surface display circuits described herein and otherwise known in the art and (7) one or more circuits for the production or degradation of one or more metabolites (e.g., kynurenine, tryptophan, adenosine, arginine) described herein (8) combinations of one or more of such additional circuits. In any of these embodiments, the genetically engineered bacteria may be administered alone or in combination with one or more immune checkpoint inhibitors described herein, including but not limited anti-CTLA4, anti-PD1, or anti-PD-L1 antibodies.

[0696] In any of these embodiments, the genetically engineered bacteria comprising gene sequence(s) encoding arginine production and/or ammonia consumption circuitry further comprise gene sequence(s) encoding one or more further effector molecule(s), i.e., therapeutic molecule(s) or a metabolic converter(s). In any of these embodiments, the circuit encoding arginine production and/or ammonia consumption circuitry may be combined with a circuit encoding one or more immune initiators or immune sustainers as described herein, in the same or a different bacterial strain (combination circuit or mixture of strains). The circuit encoding the immune initiators or immune sustainers may be under the control of a constitutive or inducible promoter, e.g., low oxygen inducible promoter or any other constitutive or inducible promoter described herein.

[0697] In any of these embodiments, the gene sequence(s) encoding arginine production and/or ammonia consumption circuitry may be combined with gene sequence(s) encoding one or more STING agonist producing enzymes, as described herein, in the same or a different bacterial strain (combination circuit or mixture of strains). In some embodiments, the gene sequences which are combined with the gene sequence(s) encoding arginine production and/or ammonia consumption circuitry encode DacA. DacA may be under the control of a constitutive or inducible promoter, e.g., low oxygen inducible promoter such as FNR or any other constitutive or inducible promoter described herein. In some embodiments, the dacA gene is integrated into the chromosome. In some embodiments, the gene sequences which are combined with the gene sequence(s) encoding arginine production and/or ammonia consumption circuitry encode cGAS. cGAS may be under the control of a constitutive or inducible promoter, e.g., low oxygen inducible promoter such as FNR or any other constitutive or inducible promoter described herein. In some embodiments, the gene encoding cGAS is integrated into the chromosome.

[0698] In any of these combination embodiments, the bacteria may further comprise an auxotrophic modification, e.g., a mutation or deletion in DapA, ThyA, or both. In any of these embodiments, the bacteria may further comprise a phage modification, e.g., a mutation or deletion, in an endogenous prophage as described herein.

### Th1/CD8-Attracting Chemokines

[0699] Chemokines are critical for attracting and recruiting immune cells, e.g., those that activate immune response and those that induce cancer cell apoptosis. Target cells of chemokines express corresponding receptors to which chemokines bind and mediate function. Therefore, the receptors of CC and CXC chemokine are referred to as CCRs and CXCRs, respectively. CC chemokines bind to CC chemokine receptors, and CXC chemokines bind to CXC chemokine receptors. Most receptors usually bind to more than one chemokine, and most chemokines usually bind to more than one receptor.

[0700] The chemokine interferon-γ inducible protein 10 kDa (CXCL10) is a member of the CXC chemokine family which binds to the CXCR3 receptor to exert its biological effects. CXCL10 is involved in chemotaxis, induction of apoptosis, regulation of cell growth and mediation of angiostatic effects. CXCL10 is associated with a variety of human diseases including infectious diseases, chronic inflammation, immune dysfunction, tumor development, metastasis and dissemination. More importantly, CXCL10 has been identified as a major biological marker mediating disease severity and may be utilized as a prognostic indicator for various diseases. In this review, we focus on current research elucidating the emerging role of CXCL10 in the pathogenesis of cancer. Understanding the role of CXCL10 in disease initiation and progression may provide the basis for developing CXCL10 as a potential biomarker and therapeutic target for related human malignancies.

[0701] CXCL10 and CXCL9 each specifically activate a receptor, CXCR3, which is a seven trans-membrane-spanning G protein-coupled receptor predominantly expressed on activated T lymphocytes (Th1), natural killer (NK) cells, inflammatory dendritic cells, macrophages and B cells. The interferon-induced angiostatic CXC chemokines and interferon-inducible T-cell chemoattractant (I-TAC/CXCL11), also activate CXCR3. These CXC chemokines are preferentially expressed on Th1 lymphocytes.

[0702] Immune-mediated, tissue-specific destruction has been associated with Th1 polarization, related chemokines (CXCR3 and CCR5 ligands, such as CXCL10 and CXCL9), and genes associated with the activation of cytotoxic mechanisms. Other studies have shown that long disease-free survival and overall survival in cancers such as early-stage breast cancer, colorectal, lung, hepatocellular, ovarian, and melanoma are consistently associated with the activation of T helper type 1 (Th1) cell-related factors, such as IFN-gamma, signal transducers and activator of transcription 1 (STA1), IL-12, IFN-regulatory factor 1, transcription factor T-bet, immune effector or cytotoxic factors (granzymes), perforin, and granulysin, CXCR3 and CCR6 ligand chemokines (CXCL9, CXCL10, and CCL5), other chemokines (CXCL1 and CCL2), and adhesion molecules (MADCAM1, ICAM1, VCAM1). Chemoattraction and adhesion has been shown to play a critical role in determining the density of intratumoral immune cells.

[0703] Other studies have shown that up-regulation of CXCL9, CXCL10, and CXCL11 is predictive of treatment responsiveness (particular responsive to adoptive-transfer therapy). Still other studies have shown that chemokines that drive tumor infiltration by lymphocytes predicts survival of patients with hepatocellular carcinoma.

[0704] It is now recognized that cancer progression is regulated by both cancer cell-intrinsic and microenvironmental factors. It has been demonstrated that the presence of T helper 1 (Th1) and/or cytotoxic T cells correlates with a reduced risk of relapse in several cancers and that a pro-inflammatory tumor microenvironment correlates with prolonged survival in a cohort of patients with hepatocellular carcinoma. CXCL10, CCL5, and CCL2 expression has been shown to correlate with tumor infiltration by Th1, CD8⁺ T cells, and natural killer cells. Data shows that CXCL10, CCL5, and CCL2 are the main chemokines attracting Th1, CD8⁺ T cells, and NK cells into the tumor microenvironment. Also, CXCL10 and TLR3 (induces CXCL 10, CCL5, and CCL2) expression correlates with cancer cell apoptosis.

[0705] C-X-C motif chemokine 10 (CXCL10), also known as Interferon gamma-induced protein 10 (IP-10) or small-inducible cytokine B10 is an 8.7 kDa protein that in humans is encoded by the CXCL10 gene. CXCL10 is a small cytokine belonging to the CXC chemokine family which is secreted by several cell types in response to IFN-γ, including monocytes, endothelial cells and fibroblasts. CXCL10 plays several roles, including chemoattraction for monocytes/macrophages, T cells, NK cells, and dendritic cells, promotion of T cell adhesion to endothelial cells, antitumor activity, and inhibition of bone marrow colony formation and angiogenesis. This chemokine elicits its effects by binding to the cell surface chemokine receptor CXCR3.

[0706] Under proinflammatory conditions CXCL10 is secreted from a variety of cells, such as leukocytes, activated neutrophils, eosinophils, monocytes, epithelial cells, endothelial cells, stromal cells (fibroblasts) and keratinocytes in response to IFN-γ. This crucial regulator of the interferon response, preferentially attracts activated Th1 lymphocytes to the area of inflammation and its expression is associated with Th1 immune responses. CXCL10 is also a chemoattractant for monocytes, T cells and NK cells. (Chew et al., Gut, 2012, 61:427-438. Still other studies have shown that immune-protective signature genes, such as Th1-type chemokines CXCL10 and CXCL9, may be epigenetically silenced in cancer. (Peng et al., Nature, 2015, doi:10.1038/nature 15520).

[0707] Chemokine (C-X-C motif) ligand 9 (CXCL9) is a small cytokine belonging to the CXC chemokine family that is also known as Monokine induced by gamma interferon (MIG). CXCL9 is a T-cell chemoattractant (Th1/CD8-attracting chemokine) which is induced by IFN-γ. It is closely related to two other CXC chemokines, CXCL10 and CXCL11. CXCL9, CXCL10 and CXCL11 all elicit their chemotactic functions by interacting with the chemokine receptor CXCR3.

[0708] In some embodiments, the engineered bacteria comprise gene sequence encoding one or more chemokines that are Th1/CD8-attracting chemokines. In some embodiments, the engineered bacteria comprise gene sequence encoding one or more chemokines that are CXCR3 ligand chemokines. In some embodiments, the engineered bacteria comprise gene sequence encoding one or more chemokines that are CCR5 ligand chemokines. In some embodiments, the engineered bacteria comprise gene sequence encoding one or more copies of CXCL10.

[0709] In any of these embodiments, the genetically engineered bacteria produce at least about 0% to 2% to 4%, 4% to 6%,6% to 8%, 8% to 10%, 10% to 12%, 12% to 14%, 14% to 16%, 16% to 18%, 18% to 20%, 20% to 25%,25% to 30%, 30% to 35%, 35% to 40%,40% to 45% 45% to 50%, 50% to 55%, 55% to 60%, 60% to 65%, 65% to 70% to 80%, 80% to 90%, or 90% to 100% more CXCL10 than unmodified bacteria of the same bacterial subtype under the same conditions. In yet another embodiment, the genetically engineered bacteria produce at least about 1.0-1.2-fold, 1.2-1.4-fold, 1.4-1.6-fold, 1.6-1.8-fold, 1.8-2-fold, or two-fold more CXCL10 than unmodified bacteria of the same bacterial subtype under the same conditions. In yet another embodiment, the genetically engineered bacteria produce at least about three-fold, four-fold, five-fold, six-fold, seven-fold, eight-fold, nine-fold, ten-fold, fifteen-fold, twenty-fold, thirty-fold, forty-fold, or fifty-fold, hundred-fold, five hundred-fold, or one-thousand-fold more CXCL10 than unmodified bacteria of the same bacterial subtype under the same conditions.

[0710] In any of these embodiments, the bacteria genetically engineered to produce CXCL10 secrete at least about 0% to 2% to 4%, 4% to 6%,6% to 8%, 8% to 10%, 10% to 12%, 12% to 14%, 14% to 16%, 16% to 18%, 18% to 20%, 20% to 25%,25% to 30%, 30% to 35%, 35% to 40%,40% to 45% 45% to 50%, 50% to 55%, 55% to 60%, 60% to 65%, 65% to 70% to 80%, 80% to 90%, or 90% to 100% more CXCL10 than unmodified bacteria of the same bacterial subtype under the same conditions. In yet another embodiment, the genetically engineered bacteria secrete at least about 1.0-1.2-fold, 1.2-1.4-fold, 1.4-1.6-fold, 1.6-1.8-fold, 1.8-2-fold, or two-fold more CXCL10 than unmodified bacteria of the same bacterial subtype under the same conditions. In yet another embodiment, the genetically engineered bacteria secrete at least about three-fold, four-fold, five-fold, six-fold, seven-fold, eight-fold, nine-fold, ten-fold, fifteen-fold, twenty-fold, thirty-fold, forty-fold, or fifty-fold, hundred-fold, five hundred-fold, or one-thousand-fold more CXCL10 than unmodified bacteria of the same bacterial subtype under the same conditions.

[0711] In some embodiments, the bacteria genetically engineered to secrete CXCL10 are capable of reducing cell proliferation by at least about 10% to 20%, 20% to 25%, 25% to 30%, 30% to 40%, 40% to 50%, 50% to 60%, 60% to 70%, 70% to 75%, 75% to 80%, 80% to 85%, 85% to 90%, 90% to 95%, 95% to 99%, or more as compared to an unmodified bacteria of the same subtype under the same conditions. In some embodiments, the bacteria genetically engineered to secrete CXCL10 are capable of reducing tumor growth by at least about 10% to 20%, 20% to 25%, 25% to 30%, 30% to 40%, 40% to 50%, 50% to 60%, 60% to 70%, 70% to 75%, 75% to 80%, 80% to 85%, 85% to 90%, 90% to 95%, 95% to 99%, or more as compared to an unmodified bacteria of the same subtype under the same conditions. In some embodiments, the bacteria genetically engineered to secrete CXCL10 are capable of reducing tumor size by at least about 10% to 20%, 20% to 25%, 25% to 30%, 30% to 40%, 40% to 50%, 50% to 60%, 60% to 70%, 70% to 75%, 75% to 80%, 80% to 85%, 85% to 90%, 90% to 95%, 95% to 99%, or more as compared to an unmodified bacteria of the same subtype under the same conditions. In some embodiments, the bacteria genetically engineered to produce CXCL10 are capable of reducing tumor volume by at least about 10% to 20%, 20% to 25%, 25% to 30%, 30% to 40%, 40% to 50%, 50% to 60%, 60% to 70%, 70% to 75%, 75% to 80%, 80% to 85%, 85% to 90%, 90% to 95%, 95% to 99%, or more as compared to an unmodified bacteria of the same subtype under the same conditions. In some embodiments, the bacteria genetically engineered to produce CXCL10 are capable of reducing tumor weight by at least about 10% to 20%, 20% to 25%, 25% to 30%, 30% to 40%, 40% to 50%, 50% to 60%, 60% to 70%, 70% to 75%, 75% to 80%, 80% to 85%, 85% to 90%, 90% to 95%, 95% to 99%, or more as compared to an unmodified bacteria of the same subtype under the same conditions. In some embodiments, the bacteria genetically engineered to produce CXCL10 are capable of increasing the response rate by at least about 10% to 20%, 20% to 25%, 25% to 30%, 30% to 40%, 40% to 50%, 50% to 60%, 60% to 70%, 70% to 75%, 75% to 80%, 80% to 85%, 85% to 90%, 90% to 95%, 95% to 99%, or more as compared to an unmodified bacteria of the same subtype under the same conditions.

[0712] In some embodiments, the bacteria genetically engineered to produce CXCL10 are capable of attracting activated Th1 lymphocytes to at least about 10% to 20%, 20% to 25%, 25% to 30%, 30% to 40%, 40% to 50%, 50% to 60%, 60% to 70%, 70% to 75%, 75% to 80%, 80% to 85%, 85% to 90%, 90% to 95%, 95% to 99%, or greater extent as compared to an unmodified bacteria of the same subtype under the same conditions. In some embodiments, the bacteria genetically engineered to CXCL10 are capable of attracting activated Th1 lymphocytes to at least about 10% to 20%, 20% to 25%, 25% to 30%, 30% to 40%, 40% to 50%, 50% to 60%, 60% to 70%, 70% to 75%, 75% to 80%, 80% to 85%, 85% to 90%, 90% to 95%, 95% to 99%, or greater extent as compared to an unmodified bacteria of the same subtype under the same conditions. In yet another embodiment, the genetically engineered bacteria attract activated Th1 lymphocytes to at least about 1.0-1.2-fold, 1.2-1.4-fold, 1.4-1.6-fold, 1.6-1.8-fold, 1.8-2-fold, or two-fold greater extent than unmodified bacteria of the same bacterial subtype under the same conditions. In yet another embodiment, the genetically engineered bacteria attract activated Th1 lymphocytes to about three-fold, four-fold, five-fold, six-fold, seven-fold, eight-fold, nine-fold, ten-fold, fifteen-fold, twenty-fold, thirty-fold, forty-fold, fifty-fold, hundred-fold, five hundred-fold, or one-thousand-fold greater extent than unmodified bacteria of the same bacterial subtype under the same conditions.

[0713] In some embodiments, the bacteria genetically engineered to produce CXCL10 are capable of promoting chemotaxis of T cells by at least about 10% to 20%, 20% to 25%, 25% to 30%, 30% to 40%, 40% to 50%, 50% to 60%, 60% to 70%, 70% to 75%, 75% to 80%, 80% to 85%, 85% to 90%, 90% to 95%, 95% to 99%, or greater extent as compared to an unmodified bacteria of the same subtype under the same conditions. In yet another embodiment, the genetically engineered bacteria promote chemotaxis of T cells by at least about 1.0-1.2-fold, 1.2-1.4-fold, 1.4-1.6-fold, 1.6-1.8-fold, 1.8-2-fold, or two-fold greater extent than unmodified bacteria of the same bacterial subtype under the same conditions. In yet another embodiment, the genetically engineered bacteria promote chemotaxis of T cells about three-fold, four-fold, five-fold, six-fold, seven-fold, eight-fold, nine-fold, ten-fold, fifteen-fold, twenty-fold, thirty-fold, forty-fold, fifty-fold, hundred-fold, five hundred-fold, or one-thousand-fold greater extent than unmodified bacteria of the same bacterial subtype under the same conditions.

[0714] In some embodiments, the bacteria genetically engineered to produce CXCL10 are capable of promoting chemotaxis of NK cells to at least about 10% to 20%, 20% to 25%, 25% to 30%, 30% to 40%, 40% to 50%, 50% to 60%, 60% to 70%, 70% to 75%, 75% to 80%, 80% to 85%, 85% to 90%, 90% to 95%, 95% to 99%, or greater extent as compared to an unmodified bacteria of the same subtype under the same conditions. In yet another embodiment, the genetically engineered bacteria promote chemotaxis of NK cells by at least about 1.0-1.2-fold, 1.2-1.4-fold, 1.4-1.6-fold, 1.6-1.8-fold, 1.8-2-fold, or two-fold greater extent than unmodified bacteria of the same bacterial subtype under the same conditions. In yet another embodiment, the genetically engineered bacteria promote chemotaxis of NK cells at least about three-fold, four-fold, five-fold, six-fold, seven-fold, eight-fold, nine-fold, ten-fold, fifteen-fold, twenty-fold, thirty-fold, forty-fold, fifty-fold, hundred-fold, five hundred-fold, or one-thousand-fold greater extent than unmodified bacteria of the same bacterial subtype under the same conditions.

[0715] In some embodiments, the bacteria genetically engineered to produce CXCL10 are capable of binding to CXCR3 by at least about 10% to 20%, 20% to 25%, 25% to 30%, 30% to 40%, 40% to 50%, 50% to 60%, 60% to 70%, 70% to 75%, 75% to 80%, 80% to 85%, 85% to 90%, 90% to 95%, 95% to 99%, or greater affinity as compared to an unmodified bacteria of the same subtype under the same conditions. In yet another embodiment, the genetically engineered bacteria bind to CXCR3 with at least about 1.0-1.2-fold, 1.2-1.4-fold, 1.4-1.6-fold, 1.6-1.8-fold, 1.8-2-fold, or two-fold greater affinity than unmodified bacteria of the same bacterial subtype under the same conditions. In yet another embodiment, the genetically engineered bacteria are capable of promoting chemotaxis of T cells to at least about a three-fold, four-fold, five-fold, six-fold, seven-fold, eight-fold, nine-fold, ten-fold, fifteen-fold, twenty-fold, thirty-fold, forty-fold, fifty-fold, hundred-fold, five hundred-fold, or one-thousand-fold greater extent than unmodified bacteria of the same bacterial subtype under the same conditions.

[0716] In some embodiments, the genetically engineered bacteria comprise a gene sequence encoding a CXCL10 polypeptide, or a fragment or functional variant thereof. In one embodiment, the gene sequence encoding CXCL10 polypeptide has at least about 80% identity with a sequence selected from SEQ ID NO: 1207 or SEQ ID NO: 1208. In another embodiment, the gene sequence encoding CXCL10 polypeptide has at least about 85% identity with a sequence selected from SEQ ID NO: 1207 or SEQ ID NO: 1208. In one embodiment, the gene sequence encoding CXCL10 polypeptide has at least about 90% identity with a sequence selected from SEQ ID NO: 1207 or SEQ ID NO: 1208. In one embodiment, the gene sequence CXCL10 polypeptide has at least about 95% identity with a sequence selected from SEQ ID NO: 1207 or SEQ ID NO: 1208. In another embodiment, the gene sequence encoding CXCL10 polypeptide has at least about 96%, 97%, 98%, or 99% identity with a sequence selected from SEQ ID NO: 1207 or SEQ ID NO: 1208. Accordingly, in one embodiment, the gene sequence encoding CXCL10 polypeptide has at least about 80%, 81%, 82%, 83%, 84%, 85%, 86%, 87%, 88%, 89%, 90%, 91%, 92%, 93%, 94%, 95%, 96%, 97%, 98%, or 99% identity with a sequence selected from SEQ ID NO: 1207 or SEQ ID NO: 1208. In another embodiment, the gene sequence encoding CXCL10 polypeptide comprises a sequence selected from SEQ ID NO: 1207 or SEQ ID NO: 1208. In yet another embodiment, the gene sequence encoding CXCL10 polypeptide consists of a sequence selected from SEQ ID NO: 1207 or SEQ ID NO: 1208. In any of these embodiments wherein the genetically engineered bacteria encode CXCL10, one or more of the sequences encoding a secretion tag may be removed and replaced by a different tag.

[0717] In some embodiments, the genetically engineered bacteria comprise a gene sequence encoding a CXCL10 polypeptide having at least about 80% identity with a sequence selected from SEQ ID NO: 1205 or SEQ ID NO: 1206. In some embodiments, the genetically engineered bacteria comprise a gene sequence encoding a CXCL10 polypeptide that has about having at least about 90% identity with a sequence selected from SEQ ID NO: 1205 or SEQ ID NO: 1206. In some embodiments, the genetically engineered bacteria comprise a gene sequence encoding CXCL10 polypeptide that has about having at least about 95% identity with a sequence selected from SEQ ID NO: 1205 or SEQ ID NO: 1206. In some embodiments, the genetically engineered bacteria comprise a gene sequence encoding a CXCL10 polypeptide that has about 80%, 81%, 82%, 83%, 84%, 85%, 86%, 87%, 88%, 89%, 90%, 91%, 92%, 93%, 94%, 95%, 96%, 97%, 98%, or 99% identity to a sequence selected from SEQ ID NO: 1205 or SEQ ID NO: 1206, or a functional fragment thereof. In another embodiment, the CXCL10 polypeptide comprises a sequence selected from SEQ ID NO: 1205 or SEQ ID NO: 1206. In yet another embodiment, the CXCL10 polypeptide expressed by the genetically engineered bacteria consists of a sequence selected from SEQ ID NO: 1205 or SEQ ID NO: 1206. In any of these embodiments wherein the genetically engineered bacteria encode CXCL10 polypeptide, the secretion tag may be removed and replaced by a different secretion tag.

[0718] In some embodiments, the genetically engineered microorganisms are capable of expressing any one or more of the described CXCL10 circuits in low-oxygen conditions, and/or in the presence of cancer and/or in the tumor microenvironment, or tissue specific molecules or metabolites, and/or in the presence of molecules or metabolites associated with inflammation or immune suppression, and/or in the presence of metabolites that may be present in the gut, and/or in the presence of metabolites that may or may not be present in vivo, and may be present in vitro during strain culture, expansion, production and/or manufacture, such as arabinose, cumate, and salicylate and others described herein. In some embodiments such an inducer may be administered in vivo to induce effector gene expression. In some embodiments, the gene sequences(s) encoding CXCL10 are controlled by a promoter inducible by such conditions and/or inducers. In some embodiments, the gene sequences(s) encoding CXCL10 are controlled by a constitutive promoter, as described herein. In some embodiments, the gene sequences(s) are controlled by a constitutive promoter, and are expressed in in vivo conditions and/or in vitro conditions, e.g., during expansion, production and/or manufacture, as described herein.

[0719] In some embodiments, the CXCL10 is secreted. In some embodiments, the genetically engineered bacteria comprising the gene sequence(s) encoding CXCL10 comprise a secretion tag selected from PhoA, OmpF, cvaC, TorA, FdnG, DmsA, and PelB. In some embodiments, the secretion tag is PhoA. In some embodiments, the genetically engineered bacteria further comprise one or more deletions in an outer membrane protein selected from 1pp, n1P, tolA, and PAL. In some embodiments, the deleted or mutated outer membrane protein is PAL. In some embodiments, the genetically engineered bacteria comprising gene sequence(s) for the production of CXCL10 further comprise gene sequence(s) encoding IL-15. In some embodiments, IL-15 is secreted. In some embodiments, the gene sequence(s) encoding IL-15 comprise a secretion tag selected from PhoA, OmpF, cvaC, TorA, FdnG, DmsA, and PelB. In some embodiments, the secretion tag is PhoA. In some embodiments, the genetically engineered bacteria further comprise one or more deletions in an outer membrane protein selected from 1pp, n1P, tolA, and PAL. In some embodiments, the deleted or mutated outer membrane protein is PAL.

[0720] In some embodiments, any one or more of the described genes sequences encoding CXCL10 are present on one or more plasmids (e.g., high copy or low copy) or are integrated into one or more sites in the microorganismal chromosome. Also, in some embodiments, the genetically engineered microorganisms are further capable of expressing any one or more of the described circuits and further comprise one or more of the following: (1) one or more auxotrophies, such as any auxotrophies known in the art and provided herein, e.g., thyA auxotrophy, (2) one or more kill switch circuits, such as any of the kill-switches described herein or otherwise known in the art, (3) one or more antibiotic resistance circuits, (4) one or more transporters for importing biological molecules or substrates, such any of the transporters described herein or otherwise known in the art, (5) one or more secretion circuits, such as any of the secretion circuits described herein and otherwise known in the art, (6) one or more surface display circuits, such as any of the surface display circuits described herein and otherwise known in the art and (7) one or more circuits for the production or degradation of one or more metabolites (e.g., kynurenine, tryptophan, adenosine, arginine) described herein (8) combinations of one or more of such additional circuits. In any of these embodiments, the genetically engineered bacteria may be administered alone or in combination with one or more immune checkpoint inhibitors described herein, including but not limited anti-CTLA4, anti-PD1, or anti-PD-L1 antibodies.

[0721] In any of these embodiments, the genetically engineered bacteria comprising gene sequence(s) encoding CXCL10 further comprise gene sequence(s) encoding one or more further effector molecule(s), i.e., therapeutic molecule(s) or a metabolic converter(s). In any of these embodiments, the circuit encoding CXCL10 may be combined with a circuit encoding one or more immune initiators or immune sustainers as described herein, in the same or a different bacterial strain (combination circuit or mixture of strains). The circuit encoding the immune initiators or immune sustainers may be under the control of a constitutive or inducible promoter, e.g., low oxygen inducible promoter or any other constitutive or inducible promoter described herein.

[0722] In any of these embodiments, the gene sequence(s) encoding CXCL10 may be combined with gene sequence(s) encoding one or more STING agonist producing enzymes, as described herein, in the same or a different bacterial strain (combination circuit or mixture of strains). In some embodiments, the gene sequences which are combined with the gene sequence(s) encoding CXCL10 encode DacA. DacA may be under the control of a constitutive or inducible promoter, e.g., low oxygen inducible promoter such as FNR or any other constitutive or inducible promoter described herein. In some embodiments, the dacA gene is integrated into the chromosome. In some embodiments, the gene sequences which are combined with the gene sequence(s) encoding CXCL10 encode cGAS. cGAS may be under the control of a constitutive or inducible promoter, e.g., low oxygen inducible promoter such as FNR or any other constitutive or inducible promoter described herein. In some embodiments, the gene encoding cGAS is integrated into the chromosome.

[0723] In any of these combination embodiments, the bacteria may further comprise an auxotrophic modification, e.g., a mutation or deletion in DapA, ThyA, or both. In any of these embodiments, the bacteria may further comprise a phage modification, e.g., a mutation or deletion, in an endogenous prophage as described herein.

[0724] In any of these embodiments, the genetically engineered bacteria produce at least about 0% to 2% to 4%, 4% to 6%,6% to 8%, 8% to 10%, 10% to 12%, 12% to 14%, 14% to 16%, 16% to 18%, 18% to 20%, 20% to 25%,25% to 30%, 30% to 35%, 35% to 40%,40% to 45% 45% to 50%, 50% to 55%, 55% to 60%, 60% to 65%, 65% to 70% to 80%, 80% to 90%, or 90% to 100% more CXCL9 than unmodified bacteria of the same bacterial subtype under the same conditions. In yet another embodiment, the genetically engineered bacteria produce at least about 1.0-1.2-fold, 1.2-1.4-fold, 1.4-1.6-fold, 1.6-1.8-fold, 1.8-2-fold, or two-fold more CXCL9 than unmodified bacteria of the same bacterial subtype under the same conditions. In yet another embodiment, the genetically engineered bacteria produce at least about three-fold, four-fold, five-fold, six-fold, seven-fold, eight-fold, nine-fold, ten-fold, fifteen-fold, twenty-fold, thirty-fold, forty-fold, or fifty-fold, hundred-fold, five hundred-fold, or one-thousand-fold more CXCL9 than unmodified bacteria of the same bacterial subtype under the same conditions.

[0725] In any of these embodiments, the bacteria genetically engineered to produce CXCL9 secrete at least about 0% to 2% to 4%, 4% to 6%,6% to 8%, 8% to 10%, 10% to 12%, 12% to 14%, 14% to 16%, 16% to 18%, 18% to 20%, 20% to 25%,25% to 30%, 30% to 35%, 35% to 40%,40% to 45% 45% to 50%, 50% to 55%, 55% to 60%, 60% to 65%, 65% to 70% to 80%, 80% to 90%, or 90% to 100% more CXCL9 than unmodified bacteria of the same bacterial subtype under the same conditions. In yet another embodiment, the genetically engineered bacteria secrete at least about 1.0-1.2-fold, 1.2-1.4-fold, 1.4-1.6-fold, 1.6-1.8-fold, 1.8-2-fold, or two-fold more CXCL9 than unmodified bacteria of the same bacterial subtype under the same conditions. In yet another embodiment, the genetically engineered bacteria secrete at least about three-fold, four-fold, five-fold, six-fold, seven-fold, eight-fold, nine-fold, ten-fold, fifteen-fold, twenty-fold, thirty-fold, forty-fold, or fifty-fold, hundred-fold, five hundred-fold, or one-thousand-fold more CXCL9 than unmodified bacteria of the same bacterial subtype under the same conditions.

[0726] In some embodiments, the bacteria genetically engineered to secrete at least about CXCL9 are capable of reducing cell proliferation by at least about 10% to 20%, 20% to 25%, 25% to 30%, 30% to 40%, 40% to 50%, 50% to 60%, 60% to 70%, 70% to 75%, 75% to 80%, 80% to 85%, 85% to 90%, 90% to 95%, 95% to 99%, or more as compared to an unmodified bacteria of the same subtype under the same conditions. In some embodiments, the bacteria genetically engineered to secrete CXCL9 are capable of reducing tumor growth by at least about 10% to 20%, 20% to 25%, 25% to 30%, 30% to 40%, 40% to 50%, 50% to 60%, 60% to 70%, 70% to 75%, 75% to 80%, 80% to 85%, 85% to 90%, 90% to 95%, 95% to 99%, or more as compared to an unmodified bacteria of the same subtype under the same conditions.

[0727] In some embodiments, the bacteria genetically engineered to secrete CXCL9 are capable of reducing tumor size by at least about 10% to 20%, 20% to 25%, 25% to 30%, 30% to 40%, 40% to 50%, 50% to 60%, 60% to 70%, 70% to 75%, 75% to 80%, 80% to 85%, 85% to 90%, 90% to 95%, 95% to 99%, or more as compared to an unmodified bacteria of the same subtype under the same conditions. In some embodiments, the bacteria genetically engineered to produce CXCL9 are capable of reducing tumor volume by at least about 10% to 20%, 20% to 25%, 25% to 30%, 30% to 40%, 40% to 50%, 50% to 60%, 60% to 70%, 70% to 75%, 75% to 80%, 80% to 85%, 85% to 90%, 90% to 95%, 95% to 99%, or more as compared to an unmodified bacteria of the same subtype under the same conditions. In some embodiments, the bacteria genetically engineered to produce CXCL9 are capable of reducing tumor weight by at least about 10% to 20%, 20% to 25%, 25% to 30%, 30% to 40%, 40% to 50%, 50% to 60%, 60% to 70%, 70% to 75%, 75% to 80%, 80% to 85%, 85% to 90%, 90% to 95%, 95% to 99%, or more as compared to an unmodified bacteria of the same subtype under the same conditions. In some embodiments, the bacteria genetically engineered to produce CXCL9 are capable of increasing the response rate by at least about 10% to 20%, 20% to 25%, 25% to 30%, 30% to 40%, 40% to 50%, 50% to 60%, 60% to 70%, 70% to 75%, 75% to 80%, 80% to 85%, 85% to 90%, 90% to 95%, 95% to 99%, or more as compared to an unmodified bacteria of the same subtype under the same conditions.

[0728] In some embodiments, the bacteria genetically engineered to produce CXCL9 are capable of attracting activated Th1 lymphocytes to at least about 10% to 20%, 20% to 25%, 25% to 30%, 30% to 40%, 40% to 50%, 50% to 60%, 60% to 70%, 70% to 75%, 75% to 80%, 80% to 85%, 85% to 90%, 90% to 95%, 95% to 99%, or greater extent as compared to an unmodified bacteria of the same subtype under the same conditions. In yet another embodiment, the genetically engineered bacteria attract activated Th1 lymphocytes to at least about 1.0-1.2-fold, 1.2-1.4-fold, 1.4-1.6-fold, 1.6-1.8-fold, 1.8-2-fold, or two-fold greater extent than unmodified bacteria of the same bacterial subtype under the same conditions. In yet another embodiment, the genetically engineered bacteria attract activated Th1 lymphocytes to at least about a three-fold, four-fold, five-fold, six-fold, seven-fold, eight-fold, nine-fold, ten-fold, fifteen-fold, twenty-fold, thirty-fold, forty-fold, fifty-fold, hundred-fold, five hundred-fold, or one-thousand-fold greater extent than unmodified bacteria of the same bacterial subtype under the same conditions.

[0729] In some embodiments, the bacteria genetically engineered to produce CXCL9 are capable of promoting chemotaxis of T cells by at least about 10% to 20%, 20% to 25%, 25% to 30%, 30% to 40%, 40% to 50%, 50% to 60%, 60% to 70%, 70% to 75%, 75% to 80%, 80% to 85%, 85% to 90%, 90% to 95%, 95% to 99%, or more as compared to an unmodified bacteria of the same subtype under the same conditions. In yet another embodiment, the genetically engineered bacteria promote chemotaxis of T cells to at least about 1.0-1.2-fold, 1.2-1.4-fold, 1.4-1.6-fold, 1.6-1.8-fold, 1.8-2-fold, or two-fold greater extent than unmodified bacteria of the same bacterial subtype under the same conditions. In yet another embodiment, the genetically engineered bacteria promote chemotaxis of T cells to a at least about three-fold, four-fold, five-fold, six-fold, seven-fold, eight-fold, nine-fold, ten-fold, fifteen-fold, twenty-fold, thirty-fold, forty-fold, fifty-fold, hundred-fold, five hundred-fold, or one-thousand-fold greater extent than unmodified bacteria of the same bacterial subtype under the same conditions.

[0730] In some embodiments, the bacteria genetically engineered to produce CXCL9 are capable of promoting chemotaxis of NK cells by at least about 10% to 20%, 20% to 25%, 25% to 30%, 30% to 40%, 40% to 50%, 50% to 60%, 60% to 70%, 70% to 75%, 75% to 80%, 80% to 85%, 85% to 90%, 90% to 95%, 95% to 99%, or more as compared to an unmodified bacteria of the same subtype under the same conditions. In yet another embodiment, the genetically engineered bacteria promote chemotaxis of NK cells to at least about 1.0-1.2-fold, 1.2-1.4-fold, 1.4-1.6-fold, 1.6-1.8-fold, 1.8-2-fold, or two-fold greater extent than unmodified bacteria of the same bacterial subtype under the same conditions. In yet another embodiment, the genetically engineered bacteria promote chemotaxis of NK cells to a three-fold, four-fold, five-fold, six-fold, seven-fold, eight-fold, nine-fold, ten-fold, fifteen-fold, twenty-fold, thirty-fold, forty-fold, fifty-fold, hundred-fold, five hundred-fold, or one-thousand-fold greater extent than unmodified bacteria of the same bacterial subtype under the same conditions.

[0731] In some embodiments, the bacteria genetically engineered to produce CXCL9 are capable of binding to CXCR3 by at least about 10% to 20%, 20% to 25%, 25% to 30%, 30% to 40%, 40% to 50%, 50% to 60%, 60% to 70%, 70% to 75%, 75% to 80%, 80% to 85%, 85% to 90%, 90% to 95%, 95% to 99%, or greater affinity as compared to an unmodified bacteria of the same subtype under the same conditions. In yet another embodiment, the genetically engineered bacteria bind to CXCR3 with at least 1.0-1.2-fold, 1.2-1.4-fold, 1.4-1.6-fold, 1.6-1.8-fold, 1.8-2-fold, or two-fold greater affinity than unmodified bacteria of the same bacterial subtype under the same conditions. In yet another embodiment, the genetically engineered bacteria are capable of binding to CXCR3 with at least about three-fold, four-fold, five-fold, six-fold, seven-fold, eight-fold, nine-fold, ten-fold, fifteen-fold, twenty-fold, thirty-fold, forty-fold, fifty-fold, hundred-fold, five hundred-fold, or one-thousand-fold greater affinity than unmodified bacteria of the same bacterial subtype under the same conditions.

[0732] In some embodiments, the genetically engineered microorganisms are capable of expressing any one or more of the described CXCL9 circuits in low-oxygen conditions, and/or in the presence of cancer and/or in the tumor microenvironment, or tissue specific molecules or metabolites, and/or in the presence of molecules or metabolites associated with inflammation or immune suppression, and/or in the presence of metabolites that may be present in the gut, and/or in the presence of metabolites that may or may not be present in vivo, and may be present in vitro during strain culture, expansion, production and/or manufacture, such as arabinose, cumate, and salicylate and others described herein. In some embodiments such an inducer may be administered in vivo to induce effector gene expression. In some embodiments, the gene sequences(s) encoding CXCL9 are controlled by a promoter inducible by such conditions and/or inducers. In some embodiments, the gene sequences(s) encoding CXCL9 are controlled by a constitutive promoter, as described herein. In some embodiments, the gene sequences(s) are controlled by a constitutive promoter, and are expressed in in vivo conditions and/or in vitro conditions, e.g., during expansion, production and/or manufacture, as described herein.

[0733] In some embodiments, any one or more of the described genes sequences encoding CXCL9 are present on one or more plasmids (e.g., high copy or low copy) or are integrated into one or more sites in the microorganismal chromosome. Also, in some embodiments, the genetically engineered microorganisms are further capable of expressing any one or more of the described circuits and further comprise one or more of the following: (1) one or more auxotrophies, such as any auxotrophies known in the art and provided herein, e.g., thyA auxotrophy, (2) one or more kill switch circuits, such as any of the kill-switches described herein or otherwise known in the art, (3) one or more antibiotic resistance circuits, (4) one or more transporters for importing biological molecules or substrates, such any of the transporters described herein or otherwise known in the art, (5) one or more secretion circuits, such as any of the secretion circuits described herein and otherwise known in the art, (6) one or more surface display circuits, such as any of the surface display circuits described herein and otherwise known in the art and (7) one or more circuits for the production or degradation of one or more metabolites (e.g., kynurenine, tryptophan, adenosine, arginine) described herein (8) combinations of one or more of such additional circuits. In any of these embodiments, the genetically engineered bacteria may be administered alone or in combination with one or more immune checkpoint inhibitors described herein, including but not limited anti-CTLA4, anti-PD1, or anti-PD-L1 antibodies.

[0734] In any of these embodiments, the genetically engineered bacteria comprising gene sequence(s) encoding CXCL9 further comprise gene sequence(s) encoding one or more further effector molecule(s), i.e., therapeutic molecule(s) or a metabolic converter(s). In any of these embodiments, the circuit encoding CXCL9 may be combined with a circuit encoding one or more immune initiators or immune sustainers as described herein, in the same or a different bacterial strain (combination circuit or mixture of strains). The circuit encoding the immune initiators or immune sustainers may be under the control of a constitutive or inducible promoter, e.g., low oxygen inducible promoter or any other constitutive or inducible promoter described herein. In any of these embodiments, the gene sequence(s) encoding CXCL9 may be combined with gene sequence(s) encoding one or more STING agonist producing enzymes, as described herein, in the same or a different bacterial strain (combination circuit or mixture of strains). In some embodiments, the gene sequences which are combined with the gene sequence(s) encoding CXCL9 encode DacA. DacA may be under the control of a constitutive or inducible promoter, e.g., low oxygen inducible promoter such as FNR or any other constitutive or inducible promoter described herein. In some embodiments, the dacA gene is integrated into the chromosome. In some embodiments, the gene sequences which are combined with the gene sequence(s) encoding CXCL9 encode cGAS. cGAS may be under the control of a constitutive or inducible promoter, e.g., low oxygen inducible promoter such as FNR or any other constitutive or inducible promoter described herein. In some embodiments, the gene encoding cGAS is integrated into the chromosome. In any of these combination embodiments, the bacteria may further comprise an auxotrophic modification, e.g., a mutation or deletion in DapA, ThyA, or both. In any of these embodiments, the bacteria may further comprise a phage modification, e.g., a mutation or deletion, in an endogenous prophage as described herein.

### Stromal Modulation

[0735] The accumulation of extracellular matrix (ECM) components can distort the normal architecture of tumor and stromal tissue, causing an abnormal configuration of blood and lymphatic vessels. One factor that may contribute to the therapeutic resistance of a tumor is the rigidity of the ECM that significantly compresses blood vessels, resulting in reduced perfusion (due to constraints on diffusion and convection) that ultimately impedes the delivery of therapeutics to tumor cells. One strategy to reduce vessel compression in the stroma and assist in drug delivery is to enzymatically break down the ECM scaffold, which in some stromal tumor environments consist of fibroblasts, immune cells, and endothelial cells imbedded within a dense and complex ECM with abundant Hyaluronan or Hyaluronic acid (HA). HA is a large linear glycosaminoglycan (GAG) composed of repeating N-acetyl glucosamine and glucuronic acid units that retains water due to its high colloid osmotic pressure. HA is believed to play a role in tumor stroma formation and maintenance. Enzymatic HA degradation by hyaluronidase (PEGPH20; rHuPH20) has been shown to decrease interstitial fluid pressure in mouse pancreatic ductal adenocarcinoma (PDA) tumors with a concomitant observation in vessel patency, drug delivery, and survival (Provenzano et al. Cancer Cell, 2012, 21:418-429; Thompson et al., Mol Cancer Ther, 2010, 9:3052-64). It is believed that PEGPH20 liberates water bound to HA by cleaving the extended polymer into substituent units. The release of trapped water decreases the interstitial fluid pressure to a range of 20-30 mmHg, enabling collapsed arterioles and capillaries to open (Provenzano et al.).

[0736] In some embodiments, the engineered bacteria comprise gene sequence encoding one or more molecules that modulate the stroma. In some embodiments, the engineered bacteria comprise gene sequence encoding one or more copies of an enzyme that degrades Hyaluronan or Hyaluronic acid (HA). In some embodiments, the engineered bacteria comprise gene sequence encoding one or more copies of hyaluronidase.

[0737] In any of these embodiments, the genetically engineered bacteria produce at least about 0% to 2% to 4%, 4% to 6%,6% to 8%, 8% to 10%, 10% to 12%, 12% to 14%, 14% to 16%, 16% to 18%, 18% to 20%, 20% to 25%,25% to 30%, 30% to 35%, 35% to 40%,40% to 45% 45% to 50%, 50% to 55%, 55% to 60%, 60% to 65%, 65% to 70% to 80%, 80% to 90%, or 90% to 100% more hyaluronidase than unmodified bacteria of the same bacterial subtype under the same conditions. In yet another embodiment, the genetically engineered bacteria produce at least about 1.0-1.2-fold, 1.2-1.4-fold, 1.4-1.6-fold, 1.6-1.8-fold, 1.8-2-fold, or two-fold more hyaluronidase than unmodified bacteria of the same bacterial subtype under the same conditions. In yet another embodiment, the genetically engineered bacteria produce three-fold, four-fold, five-fold, six-fold, seven-fold, eight-fold, nine-fold, ten-fold, fifteen-fold, twenty-fold, thirty-fold, forty-fold, or fifty-fold, hundred-fold, five hundred-fold, or one-thousand-fold more hyaluronidase than unmodified bacteria of the same bacterial subtype under the same conditions.

[0738] In any of these embodiments, the bacteria genetically engineered to produce hyaluronidase degrade 0% to 2% to 4%, 4% to 6%,6% to 8%, 8% to 10%, 10% to 12%, 12% to 14%, 14% to 16%, 16% to 18%, 18% to 20%, 20% to 25%,25% to 30%, 30% to 35%, 35% to 40%,40% to 45% 45% to 50%, 50% to 55%, 55% to 60%, 60% to 65%, 65% to 70% to 80%, 80% to 90%, or 90% to 100% more hyaluronan than unmodified bacteria of the same bacterial subtype under the same conditions.

[0739] In yet another embodiment, the genetically engineered bacteria degrade 1.0-1.2-fold, 1.2-1.4-fold, 1.4-1.6-fold, 1.6-1.8-fold, 1.8-2-fold, or two-fold more hyaluronan than unmodified bacteria of the same bacterial subtype under the same conditions. In yet another embodiment, the genetically engineered bacteria degrade three-fold, four-fold, five-fold, six-fold, seven-fold, eight-fold, nine-fold, ten-fold, fifteen-fold, twenty-fold, thirty-fold, forty-fold, or fifty-fold, hundred-fold, five hundred-fold, or one-thousand-fold more hyaluronan than unmodified bacteria of the same bacterial subtype under the same conditions. In one embodiment, the genetically engineered bacteria comprising one or more genes encoding hyaluronidase for secretion are capable of degrading hyaluronan to about the same extent as recombinant hyaluronidase at the same concentrations under the same conditions.

[0740] In some embodiments, the bacteria genetically engineered to secrete hyaluronidase are capable of reducing cell proliferation by at least about 10% to 20%, 20% to 25%, 25% to 30%, 30% to 40%, 40% to 50%, 50% to 60%, 60% to 70%, 70% to 75%, 75% to 80%, 80% to 85%, 85% to 90%, 90% to 95%, 95% to 99%, or more as compared to an unmodified bacteria of the same subtype under the same conditions. In some embodiments, the bacteria genetically engineered to secrete hyaluronidase are capable of reducing tumor growth by at least about 10% to 20%, 20% to 25%, 25% to 30%, 30% to 40%, 40% to 50%, 50% to 60%, 60% to 70%, 70% to 75%, 75% to 80%, 80% to 85%, 85% to 90%, 90% to 95%, 95% to 99%, or more as compared to an unmodified bacteria of the same subtype under the same conditions. In some embodiments, the bacteria genetically engineered to secrete hyaluronidase are capable of reducing tumor size by at least about 10% to 20%, 20% to 25%, 25% to 30%, 30% to 40%, 40% to 50%, 50% to 60%, 60% to 70%, 70% to 75%, 75% to 80%, 80% to 85%, 85% to 90%, 90% to 95%, 95% to 99%, or more as compared to an unmodified bacteria of the same subtype under the same conditions. In some embodiments, the bacteria genetically engineered to produce hyaluronidase are capable of reducing tumor volume by at least about 10% to 20%, 20% to 25%, 25% to 30%, 30% to 40%, 40% to 50%, 50% to 60%, 60% to 70%, 70% to 75%, 75% to 80%, 80% to 85%, 85% to 90%, 90% to 95%, 95% to 99%, or more as compared to an unmodified bacteria of the same subtype under the same conditions. In some embodiments, the bacteria genetically engineered to produce hyaluronidase are capable of reducing tumor weight by at least about 10% to 20%, 20% to 25%, 25% to 30%, 30% to 40%, 40% to 50%, 50% to 60%, 60% to 70%, 70% to 75%, 75% to 80%, 80% to 85%, 85% to 90%, 90% to 95%, 95% to 99%, or more as compared to an unmodified bacteria of the same subtype under the same conditions. In some embodiments, the bacteria genetically engineered to produce hyaluronidase are capable of increasing the response rate by at least about 10% to 20%, 20% to 25%, 25% to 30%, 30% to 40%, 40% to 50%, 50% to 60%, 60% to 70%, 70% to 75%, 75% to 80%, 80% to 85%, 85% to 90%, 90% to 95%, 95% to 99%, or more as compared to an unmodified bacteria of the same subtype under the same conditions.

[0741] In some embodiments, the genetically engineered bacteria comprise hyaluronidase gene sequence(s) encoding one or more polypeptide(s) selected from SEQ ID NO: 1127, SEQ ID NO: 1128, SEQ ID NO:1129, SEQ ID NO: 1130, SEQ ID NO: 1131 or functional fragments thereof. In some embodiments, genetically engineered bacteria comprise a gene sequence encoding a polypeptide that is at least about 80%, at least about 85%, at least about 90%, at least about 95%, or at least about 99% identity to one or more polypeptide(s) selected from selected from SEQ ID NO: 1127, SEQ ID NO: 1128, SEQ ID NO:1129, SEQ ID NO: 1130, SEQ ID NO: 1131 or a functional fragment thereof. In some specific embodiments, the polypeptide comprises one or more polypeptide(s) selected form selected from SEQ ID NO: 1127, SEQ ID NO: 1128, SEQ ID NO:1129, SEQ ID NO: 1130, SEQ ID NO: 1131. In other specific embodiments, the polypeptide consists of one or more polypeptide(s) of selected from selected from SEQ ID NO: 1127, SEQ ID NO: 1128, SEQ ID NO:1129, SEQ ID NO: 1130, SEQ ID NO: 1131. In certain embodiments, the hyaluronidase sequence has at least about 80%, 85%, 86%, 87%, 88%, 89%, 90%, 91%, 92%, 93%, 94%, 95%, 96%, 97%, 98%, or 99% identity with one or more polynucleotides selected from SEQ ID NO: 1122, SEQ ID NO: 1123, SEQ ID NO: 1224, SEQ ID NO: 1225, SEQ ID NO: 1226 or a functional fragment thereof. In some specific embodiments, the gene sequence comprises one or more sequences selected from SEQ ID NO: 1127, SEQ ID NO: 1128, SEQ ID NO:1129, SEQ ID NO: 1130, SEQ ID NO: 1131. In other specific embodiments, the gene sequence consists of one or more polynucleotides selected from SEQ ID NO: 1127, SEQ ID NO: 1128, SEQ ID NO:1129, SEQ ID NO: 1130, SEQ ID NO: 1131.

[0742] In some embodiments, the engineered bacteria comprise gene sequence encoding one or more copies of human hyaluronidase. In some embodiments, the hyaluronidase is leech hyaluronidase. In any of these embodiments, the gene sequences comprising the hyaluronidase further encode a secretion tag selected from PhoA, OmpF, cvaC, TorA, FdnG, DmsA, and PelB. In some embodiments, the secretion tag is at the N terminus of the hyaluronidase polypeptide sequence and at the 5′ end of the hyaluronidase coding sequence. In some embodiments, the secretion tag is at the C terminus of the hyaluronidase polypeptide sequence and at the 3′ end of the hyaluronidase coding sequence. In one embodiment, the secretion tag is PhoA. In some embodiments, the genetically engineered bacteria encode hyaluronidase for secretion. In some embodiments, the genetically engineered bacteria encode hyaluronidase for display on the bacterial cell surface. In some embodiments, the genetically engineered bacteria further comprise one or more deletions in an outer membrane protein selected from 1pp, nlP, tolA, and PAL. In some embodiments, the deleted or mutated outer membrane protein is PAL.

[0743] In some embodiments, the genetically engineered microorganisms are capable of expressing any one or more of the described stromal modulation circuits or gene sequences, e.g., hyaluronidase circuits, in low-oxygen conditions, and/or in the presence of cancer and/or the tumor microenvironment, or tissue specific molecules or metabolites, and/or in the presence of molecules or metabolites associated with inflammation or immune suppression, and/or in the presence of metabolites that may be present in the gut, and/or in the presence of metabolites that may or may not be present in vivo, and may be present in vitro during strain culture, expansion, production and/or manufacture, such as arabinose, cumate, and salicylate and others described herein. In some embodiments such an inducer may be administered in vivo to induce effector gene expression. In some embodiments, the gene sequences(s) encoding stromal modulation circuits, e.g., hyaluronidase circuits, are controlled by a promoter inducible by such conditions and/or inducers in vivo and/or in vitro. In some embodiments, the gene sequences(s) are controlled by a constitutive promoter, as described herein. In some embodiments, the gene sequences(s) are controlled by a constitutive promoter, and are expressed in in vivo conditions and/or in vitro conditions, e.g., during expansion, production and/or manufacture, as described herein. In some embodiments, any one or more of the described stromal modulation gene sequences, e.g., hyaluronidase gene sequences, are present on one or more plasmids (e.g., high copy or low copy) or are integrated into one or more sites in the microorganismal chromosome.

[0744] In any of these embodiments, the genetically engineered bacteria comprising gene sequence(s) encoding stromal modulation effectors, e.g., hyaluronidase, further comprise gene sequence(s) encoding one or more further effector molecule(s), i.e., therapeutic molecule(s) or a metabolic converter(s). In any of these embodiments, the circuit encoding stromal modulation effectors, e.g., hyaluronidase, may be combined with a circuit encoding one or more immune initiators or immune sustainers as described herein, in the same or a different bacterial strain (combination circuit or mixture of strains). The circuit encoding the immune initiators or immune sustainers may be under the control of a constitutive or inducible promoter, e.g., low oxygen inducible promoter or any other constitutive or inducible promoter described herein.

[0745] In any of these embodiments, the gene sequence(s) encoding stromal modulation effectors, e.g., hyaluronidase, may be combined with gene sequence(s) encoding one or more STING agonist producing enzymes, as described herein, in the same or a different bacterial strain (combination circuit or mixture of strains). In some embodiments, the gene sequences which are combined with the gene sequence(s) encoding stromal modulation effectors, e.g., hyaluronidase, encode DacA. DacA may be under the control of a constitutive or inducible promoter, e.g., low oxygen inducible promoter such as FNR or any other constitutive or inducible promoter described herein. In some embodiments, the dacA gene is integrated into the chromosome. In some embodiments, the gene sequences which are combined with the the gene sequence(s) encoding stromal modulation effectors, e.g., hyaluronidase, encode cGAS. cGAS may be under the control of a constitutive or inducible promoter, e.g., low oxygen inducible promoter such as FNR or any other constitutive or inducible promoter described herein. In some embodiments, the gene encoding cGAS is integrated into the chromosome.

[0746] In any of these combination embodiments, the bacteria may further comprise an auxotrophic modification, e.g., a mutation or deletion in DapA, ThyA, or both. In any of these embodiments, the bacteria may further comprise a phage modification, e.g., a mutation or deletion, in an endogenous prophage as described herein.

[0747] Also, in some embodiments, the genetically engineered microorganisms are capable of expressing any one or more of the described stromal modulation, e.g., hyaluronidase circuits, and further comprise one or more of the following: (1) one or more auxotrophies, such as any auxotrophies known in the art and provided herein, e.g., thyA auxotrophy, (2) one or more kill switch circuits, such as any of the kill-switches described herein or otherwise known in the art, (3) one or more antibiotic resistance circuits, (4) one or more transporters for importing biological molecules or substrates, such any of the transporters described herein or otherwise known in the art, (5) one or more secretion circuits, such as any of the secretion circuits described herein and otherwise known in the art, (6) one or more surface display circuits, such as any of the surface display circuits described herein and otherwise known in the art and (7) one or more circuits for the production or degradation of one or more metabolites (e.g., kynurenine, tryptophan, adenosine, arginine) described herein (8) combinations of one or more of such additional circuits. In any of these embodiments, the genetically engineered bacteria may be administered alone or in combination with one or more immune checkpoint inhibitors described herein, including but not limited anti-CTLA4, anti-PD1, or anti-PD-L1 antibodies.

### Other Immune Modulators

[0748] Other immune modulators include therapeutic nucleic acids (RNA and DNA), for example, RNAi molecules (such as siRNA, miRNA, dsRNA), mRNAs, antisense molecules, aptamers, and CRISPER/Cas 9 molecules as described in International Patent Application PCT/US2017/013072, filed Jan. 11, 2017, published as WO2017/123675, the contents of which is herein incorporated by reference in its entirety. Thus, in some embodiments, the genetically engineered bacteria comprise sequence(s) for producing one or immune modulators that are RNA or DNA immune modulators, e.g., including nucleic acid molecules selected from RNAi molecules (siRNA, miRNA, dsRNA), mRNAs, antisense molecules, aptamers, and CRISPR/Cas 9 molecules. Such molecules are exemplified and discussed in the references provided herein below.

[0749] In any of these embodiments, these circuits may be combined with a circuit for the production of one or more immune initiators (e.g., a STING agonist as described herein the same or a different bacterial strain (combination circuit or mixture of strains).

### Combinations of Immune Initiators and Immune Sustainers

[0750] In some embodiments, the circuitry expressed by the genetically engineered bacteria is selected to combine multiple mechanisms. For example, by activating multiple orthogonal immunomodulatory pathways in the tumor microenvironment, immunologically cold tumors are transformed into immunologically hot tumors. Multiple effectors can be selected which have an impact on different components of the immune response. Different immune response components which can be targeted by the effectors expressed by the genetically engineered bacteria include immune initiation and immune augmentation and T cell expansion (immune sustenance).

[0751] In some embodiments, a first modified microorganism producing at least a first immune modulator, e.g., an immune initiator or an immune sustainer, may be administered in combination with, e.g., before, at the same time as, or after, a second modified microorganism producing at least a second immune modulator, e.g., an immune initiator or an immune sustainer. In other embodiments, one or more immune modulators may be administered in combination with, e.g., before, at the same time as, or after, a modified microorganism capable of producing a second immune modulator(s). For example, one or more immune initiators may be administered in combination with, e.g., before, at the same time as, or after, a modified microorganism capable of producing one or more immune sustainers. In another embodiment, one or more immune sustainers may be administered in combination with, e.g., before, at the same time as, or after, a modified microorganism capable of producing one or more immune initiators. Alternatively, one or more first immune initiators may be administered in combination with, e.g., before, at the same time as, or after, a modified microorganism capable of producing one or more second immune initiators. Alternatively, one or more first immune sustainers may be administered in combination with, e.g., before, at the same time as, or after, a modified microorganism capable of producing one or more second immune sustainers. In some embodiments, an immune initiator and/or an immune sustainer may further be combined with a stromal modulator, e.g., hyaluronidase.

[0752] In some embodiments, one or more microorganisms are genetically engineered to express gene sequence(s) encoding one or more immunomodulatory effectors or combinations of two or more these effectors. In some embodiments, the genetically engineered bacteria comprise circuitry encoding one or more immunomodulatory effectors or combinations of two or more these effectors. Alternatively, the disclosure provides a composition comprising a combination (e.g., two or more) of different or separate genetically engineered bacteria, each bacteria encoding one or more one or more immunomodulatory effectors. Such distinct or different bacterial strains can be administered concurrently or sequentially.

[0753] In some embodiments, the genetically engineered bacteria comprise circuitry that can modulate immune initiation (including e.g., activation and priming) and immune sustenance (including e.g., immune augmentation or T cell expansion). Accordingly, in some embodiments, the genetically engineered bacteria comprise circuitry or gene sequences encoding one or more immune initiators and one or more immune sustainers.

[0754] Alternatively, the disclosure provides a composition comprising a combination (e.g., two or more) of different genetically engineered bacteria, each bacteria encoding one or more immune initiators and/or one or more immune sustainers. Such distinct or different bacterial strains can be administered concurrently or sequentially.

[0755] Each combination of gene sequence(s), circuits, effectors, immune modulators, immune initiators or immune sustainers described herein can either be provided as combination circuitry in one bacterial strain or alternatively in two or more different or separate bacterial strains each expressing one or more gene sequence(s), circuits, effectors, immune modulators, immune initiators or immune sustainers of the combination. For example, one or more genetically engineered bacteria comprising circuitry for the production of an immune initiator and gene circuitry for the production of an immune sustainer can be provided in one strain comprising both circuits or in two or more strains, each comprising at least one of the circuits.

[0756] In some embodiments of the disclosure, in which a microorganism genetically engineered to express an immune initiator circuit and immune sustainer circuit, the microorganism first produces higher levels of immune stimulator and at a later time point immune sustainer. In certain embodiments, the one or more gene sequences are under the control of inducible promoters known in the art or described herein. For example, such inducible promoters may be induced under low-oxygen conditions, such as an FNR promoter. In some embodiments, the one or more gene sequence(s) are operably linked to a directly or indirectly inducible promoter that is induced under inflammatory conditions (e.g., RNS, ROS), as described herein. In other embodiments, the promoters are induced in the presence of certain molecules or metabolites, e.g., in the presence of molecules or metabolites associated with the tumor microenvironment and/or with immune suppression. In some embodiments, the promoters are induced in certain tissue types.

[0757] In some embodiments, promoters are induced in the presence of certain gut-specific or tumor-specific molecules or metabolites. In some embodiments, the promoters are induced in the presence of some other metabolite that may or may not be present in the gut or the tumor, such as arabinose, cumate, and salicylate or another chemical or nutritional inducer known in the art or described herein. In certain embodiments, the one or more cassettes are under the control of constitutive promoters described herein or known in the art, e.g., whose expression can be fine-tuned using ribosome binding sites of different strengths. Such microorganisms optionally also comprise an auxotrophic modification, e.g., an auxotrophic modification amino acid or nucleotide metabolism. Non-limiting examples of genes which may be modified are ThyA and DapA or both (ΔDapA or ΔThyA or both).

[0758] In some embodiments, expression of the immune initiator is under control of a promoter induced by a chemical inducer. In some embodiments, immune sustainer is under control of a promoter induced by a chemical inducer. In some embodiments, both immune initiator and immune sustainer are under control of promoters which are induced by a chemical inducer. The inducer (inducing immune stimulator expression) and a second inducer (inducing immune sustainer expression) may be the same or different inducers. First inducer and second inducer may be administered sequentially or concurrently. In some embodiments, immune sustainers and/or immune initiators may be induced under in vivo conditions, e.g., by conditions of the gut or the tumor microenvironment (e.g., low oxygen, certain nutrients, etc.), conditions during cell culture or in vitro growth, or chemical inducers (e.g., arabinose, cumate, and salicylate, IPTG or other chemical inducers described herein), which can be employed in vitro or in vivo.

[0759] In some embodiments, the immune initiator is controlled by or directly or indirectly linked to an inducible promoter and immune sustainer is controlled by or directly or indirectly linked to a constitutive promoter. In some embodiments, the immune initiator is controlled by or directly or indirectly linked to an constitutive promoter and the immune sustainer is controlled by or directly or indirectly linked to an inducible promoter.

[0760] In some embodiments both circuits may be integrated into the bacterial chromosome. In some embodiments, both circuits may be present on a plasmid. In some embodiments both circuits may be present on a plasmid. In some embodiments one circuit may be integrated into the bacterial chromosome and another circuit may be present on a plasmid.

[0761] In another embodiment, a bacterial strain expressing circuitry for immune initiation may be administered in conjunction with a separate bacterial strain expressing circuitry for immune sustenance. For example, one or more strain(s) of genetically engineered bacteria expressing immune initiatory circuitry and one or more separate strains of genetically engineered bacteria expressing immune sustainer circuitry may be administered sequentially, e.g., immune stimulator may be administered before immune sustainer. In another example, the immune initiator strain may be administered after the immune sustainer strain. In yet another example, the immune initiator strain may be administered concurrently with the immune sustainer strain.

[0762] Regardless of the sequence or timing of the administration (concurrent or sequential), engineered strains may express the circuitry for the immune sustainer sequentially or concurrently upon administration, i.e., timing and levels of expression are tuned using one or more mechanisms described herein, including but not limited to promoters and ribosome binding sites.

[0763] In a more specific example, one or more genetically engineered bacteria comprising gene sequence(s) encoding an enzyme for the production of a STING agonist and gene sequence(s) encoding an enzyme for the consumption of kynurenine can be provided in one strain comprising both circuits or in two or more strains, each comprising at least one of the circuits. In a non-limiting example of administration, an immune initiator producing strain is administered first, and then a immune sustainer producing strain is administered second. In a more specific non-limiting example of administration, a STING agonist producing strain is administered first, and then a kynurenine consuming strain is administered second.

[0764] Non-limiting examples of immune initiators and sustainers are described in Table 7 and Table 8.

TABLE 7
Immune Initiators

| Effect | Type | Effector |
|---|---|---|
| Immune activation/ | Cytokine/Chemokine | TNFα |
| Oncolysis/Priming | | |
| Immune activation/ | Cytokine/Chemokine | IFN-gamma |
| Priming | | |
| Immune activation/ | Cytokine/Chemokine | IFN-beta1 |
| Priming | | |
| Immune activation/ | Single chain | SIRPα |
| Phagocytosis/Priming | antibodies/Ligands | |
| Immune activation/ | Single chain | CD40L |
| Priming | antibodies/Ligands | |
| Immune activation/ | Metabolic conversion | STING agonist |
| Priming | | |
| Immune activation/ | Cytokine/Chemokine | GMCSF |
| Priming | | |
| Immune activation/ | T cell co-stimulatory | Agonistic anti-OX40 |
| Priming | receptor/Ligands | antibody or agonistic |
| | | OX40L |
| Immune activation/ | T cell co-stimulatory | Agonistic anti-41BB |
| Priming | receptor/Ligands | antibody or agonistic |
| | | 41BBL |
| Immune activation/ | T cell co-stimulatory | Agonistic anti-GITR |
| Priming | receptor/Ligands | antibody or agonistic |
| | | GITRL |
| Immune activation/ | Single chain | Anti-PD-1 antibody, |
| Priming | antibodies/Ligands | anti-PD-L1 antibody |
| | | (antagonistic) |
| Immune activation/ | Single chain | Anti-CTLA4 antibody |
| Priming | antibodies/Ligands | (antagonistic) |
| Oncolysis/Priming | Engineered | 5FC->5FU |
| | chemotherapy | |
| Oncolyis/Priming | Lytic peptides | Lytic peptides |
| | | (e.g. azurin) |
| Immune activation/ | Metabolic conversion | Arginine |
| Priming | | |

TABLE 8
Immune Sustainers

| Effect | Type | Effector |
|---|---|---|
| Immune Augmentation/ | Single chain | Anti-PD-1antibody, |
| Reversal of Exhaustion | antibodies/Ligands | anti-PD-L1 antibody |
| | | (antagonistic) |
| Immune Augmentation/ | Single chain | Anti-CTLA4 antibody |
| T cell Expansion | antibodies/Ligands | (antagonistic) |
| Immune Augmentation/ | Cytokine/Chemokine | IL-15 |
| T cell Expansion | | |
| Immune Augmentation/ | Cytokine/Chemokine | CXCL10 |
| T cell Recruitment | | |
| Immune Augmentation/ | Metabolic conversion | Arginine |
| T cell Expansion | | |
| Immune Augmentation/ | Metabolic conversion | Adenosine consumer |
| T cell Expansion | | |
| Immune Augmentation/ | Metabolic conversion | Kynurenine consumer |
| T cell Expansion | | |
| Immune Augmentation/ | Co-stimulatory | Agonistic anti-OX40 |
| T cell Expansion | Ligand/Receptor | antibody or OX40L |
| Immune Augmentation/ | Co-stimulatory | Agonistic anti-41BB |
| T cell Expansion | Ligand/Receptor | antibody or 41BBL |
| Immune Augmentation/ | Co-stimulatory | Agonistic anti-GITR |
| T cell Expansion | Ligand/Receptor | antibody or GITRL |
| Immune Augmentation/ | Cytokine/Chemokine | IL-12 |
| T cell Expansion | | |
| Antigen presentation/ | Cytokine/Chemokine | IFN-gamma |
| Tumor cell targeting | | |

[0765] In some combination embodiments, one or more effectors of Table 7 can be combined with one or more effectors of Table 8.

[0766] Multiple effectors can be selected which have an impact on different components of the immune response. Different immune response components which can be targeted by the effectors expressed by one or more genetically engineered bacteria include oncolysis, immune activation of APCs, and activation and priming of T cells (“immune initiator”), trafficking and infiltration, immune augmentation, T cell expansion, (“immune sustainer”). In some combination embodiments, an “immune initiator” is combined with an “immune sustainer”. In some embodiments, an immune initiator and/or an immune sustainer may further be combined with a stromal modulator, e.g., hyaluronidase. In some embodiments, two or more different bacteria comprising genes encoding an immune initiator and an immune sustainer, and optionally a stromal modulator may be combined and administered concurrently or sequentially.

[0767] In some embodiments, the genetically engineered bacteria are capable of producing effector or an immune modulator which initiates the immune response, i.e., an immune initiator. Non-limiting examples of such effectors for targeting immune activation and priming described herein include soluble SIRPα, anti-CD47 antibodies, and anti-CD40 antibodies, CD40-Ligand, TNFα, IFN-gamma, 5-FC to 5-FU conversion, and STING agonists. Non-limiting examples of effectors for targeting immune augmentation described herein include kynurenine degradation, adenosine degradation, arginine production, CXCL10, IL-15, IL-12 secretion, and checkpoint inhibition, e.g., through anti-PD-1 secretion or display. Non-limiting examples of effectors for targeting T cell expansion described herein include anti-PD-1 and anti-PD-L1 antibodies, anti-CTLA-4 antibodies, and IL-15.

[0768] In one embodiment, the immune initiator is not the same as the immune sustainer. As one non-limiting example, where the immune initiator is IFN-gamma, the immune sustainer is not IFN-gamma. In one embodiment, the immune initiator is different than the immune sustainer. As one non-limiting example, where the immune initiator is IFN-gamma, the immune sustainer is not IFN-gamma.

[0769] In one combination embodiment, genetically engineered bacteria comprise gene sequences for the production of one or more immune initiators combined with one or more gene sequences for the production of one or more immune sustainers. In alternate embodiments, the disclosure provides a composition comprising a combination (e.g., two or more) of different genetically engineered bacteria. In one such composition embodiment, one or more genetically engineered bacteria comprising gene sequences for the production of one or more immune initiators may be combined with one or more genetically engineered bacteria comprising gene sequences for the production of one or more immune sustainers. Alternatively, each bacteria in the composition may have both immune sustainer(s) and immune initiator(s).

[0770] In any of these combination and/or composition embodiments, one immune initiator may be a chemokine or cytokine. In some immune sustainer and immune initiator combination and/or composition embodiments, one immune initiator is a chemokine or cytokine and one immune sustainer is a single chain antibody. In some embodiments, one immune initiator is a chemokine or cytokine and one immune sustainer is a receptor ligand. In some embodiments, one immune initiator is a chemokine or cytokine and one immune sustainer is a receptor ligand. In some embodiments, one immune initiator is a chemokine or cytokine and one immune sustainer is a chemokine or cytokine. In some embodiments, one immune initiator is a chemokine or cytokine and one immune sustainer is a metabolic conversion. The metabolic conversion may be an arginine production, adenosine consumption, and/or kynurenine consumption. In some embodiments, the chemokine or cytokine initiator is selected from TNFα, IFN-gamma and IFN-beta1. In any of these embodiments, the immune sustainer or augmenter may be selected from Anti-PD-1 single chain antibody, Anti-CTLA4 single chain antibody, IL-15, CXCL10 or a metabolic conversion. The metabolic conversion may be an arginine production, adenosine consumption, and/or kynurenine consumption.

[0771] In any of these combination and/or composition embodiments, one immune initiator may be a single chain antibody. In some immune sustainer and immune initiator combination and/or composition embodiments, one immune initiator is a single chain antibody and one immune sustainer is a single chain antibody. In some embodiments, one immune initiator is a single chain antibody and one immune sustainer is a receptor ligand. In some embodiments, one immune initiator is a single chain antibody and one immune sustainer is a receptor ligand. In some embodiments, one immune initiator is a single chain antibody and one immune sustainer is a chemokine or cytokine. In some embodiments, one immune initiator is a single chain antibody and one immune sustainer is a metabolic conversion. The metabolic conversion may be an arginine production, adenosine consumption, and/or kynurenine consumption. In any of these embodiments, the immune sustainer or augmenter may be selected from Anti-PD-1 single chain antibody, Anti-CTLA4 single chain antibody, IL-15, CXCL10 or a metabolic conversion. The metabolic conversion may be an arginine production, adenosine consumption, and/or kynurenine consumption.

[0772] In any of these combination and/or composition embodiments, one immune initiator may be a receptor ligand. In some immune sustainer and immune initiator combination and/or composition embodiments, one immune initiator is a receptor ligand and one immune sustainer is a single chain antibody. In some embodiments, one immune initiator is a receptor ligand and one immune sustainer is a receptor ligand. In some embodiments, one immune initiator is a receptor ligand and one immune sustainer is a receptor ligand. In some embodiments, one immune initiator is a receptor ligand and one immune sustainer is a chemokine or cytokine. In some embodiments, one immune initiator is a receptor ligand and one immune sustainer is a metabolic conversion. The metabolic conversion may be an arginine production, adenosine consumption, and/or kynurenine consumption. In some embodiments, in which one immune initiator is a receptor ligand, the immune initiator is CD40L. In any of these embodiments, the immune sustainer or augmenter may be selected from Anti-PD-1 single chain antibody, Anti-CTLA4 single chain antibody, IL-15, CXCL10 or a metabolic conversion. The metabolic conversion may be an arginine production, adenosine consumption, and/or kynurenine consumption. In some embodiments, the receptor ligand is SIRPα, or a fragment, variant or fusion protein thereof. In any of these embodiments, the immune sustainer or augmenter may be selected from Anti-PD-1 single chain antibody, Anti-CTLA4 single chain antibody, IL-15, CXCL10 or a metabolic conversion. The metabolic conversion may be an arginine production, adenosine consumption, and/or kynurenine consumption.

[0773] In any of these combination and/or composition embodiments, one immune initiator may be a metabolic converter. In some immune sustainer and immune initiator combination and/or composition embodiments, one immune initiator is a metabolic conversion and one immune sustainer is a single chain antibody. In some embodiments, one immune initiator is a metabolic conversion and one immune sustainer is a receptor ligand. In some embodiments, one immune initiator is a metabolic conversion and one immune sustainer is a receptor ligand. In some embodiments, one immune initiator is a metabolic conversion and one immune sustainer is a chemokine or cytokine. In some embodiments, one immune initiator is a metabolic conversion and one immune sustainer is a metabolic conversion, e.g., selected from kynurenine consumer, tryptophan producer, arginine producer, and adenosine consumer. In some embodiments, the initiator metabolic conversion is a STING agonist producer, e.g., diadenylate cyclase, e.g., DacA. In any of these embodiments, the immune sustainer or augmenter may be selected from Anti-PD-1 single chain antibody, Anti-CTLA4 single chain antibody, IL-15, CXCL10 or a metabolic conversion. The metabolic conversion may be an arginine production, adenosine consumption, and/or kynurenine consumption.

[0774] In any of these combination and/or composition embodiments, one immune initiator may be an engineered immunotherapy. In some immune sustainer and immune initiator combination and/or composition embodiments, one immune initiator is an engineered chemotherapy and one immune sustainer is a single chain antibody. In some embodiments, one immune initiator is an engineered chemotherapy and one immune sustainer is a receptor ligand. In some embodiments, one immune initiator is an engineered chemotherapy and one immune sustainer is a receptor ligand. In some embodiments, one immune initiator is an engineered chemotherapy and one immune sustainer is a chemokine or cytokine. In some embodiments, one immune initiator is an engineered chemotherapy and one immune sustainer is a metabolic conversion. The metabolic conversion may be an arginine production, adenosine consumption, and/or kynurenine consumption. In some embodiments, the initiator engineered chemotherapy is a 5FC to 5FU conversion, e.g., though codA, or variants or fusion proteins thereof. In any of these embodiments, the immune sustainer or augmenter may be selected from Anti-PD-1 single chain antibody, Anti-CTLA4 single chain antibody, IL-15, CXCL10 or a metabolic conversion. The metabolic conversion may be an arginine production, adenosine consumption, and/or kynurenine consumption.

[0775] In any of these combination and/or composition embodiments, one immune sustainer may be a single chain antibody. In some immune sustainer and immune initiator combination and/or composition embodiments, one immune sustainer is a single chain antibody and the immune initiator is a cytokine or chemokine. In some embodiments, one immune sustainer is a single chain antibody and the immune initiator is a receptor ligand. In some embodiments, one immune sustainer is a single chain antibody and the immune initiator is a single chain antibody. In some embodiments, one immune sustainer is a single chain antibody and the immune initiator is a metabolic conversion. In some embodiments, one immune sustainer is a single chain antibody and the immune initiator is an engineered chemotherapy. In some immune sustainer and immune initiator combination and/or composition embodiments, the immune sustainer is an anti-PD-1 antibody. In some immune sustainer and immune initiator combination and/or composition embodiments, the immune sustainer is an anti-CTLA4 antibody. In any of these embodiments, the immune initiator may be selected from TNFα, IFN-gamma, IFN-beta1, SIRPα, CD40L, STING agonist, and 5FC->5FU.

[0776] In any of these combination and/or composition embodiments, one immune sustainer may be a receptor ligand. In some immune sustainer and immune initiator combination and/or composition embodiments, one immune sustainer is a receptor ligand and the immune initiator is a cytokine or chemokine. In some embodiments, one immune sustainer is a receptor ligand and the immune initiator is a receptor ligand. In some embodiments, one immune sustainer is a receptor ligand and the immune initiator is a single chain antibody. In some embodiments, one immune sustainer is a receptor ligand and the immune initiator is a metabolic conversion. In some embodiments, one immune sustainer is a receptor ligand and the immune initiator is an engineered chemotherapy. In some immune sustainer and immune initiator combination and/or composition embodiments, the immune sustainer is PD1 or PDL1 or CTLA4, or a fragment, variant or fusion protein thereof. In any of these embodiments, the immune initiator may be selected from TNFα, IFN-gamma, IFN-beta1, SIRPα, CD40L, STING agonist, and 5FC->5FU.

[0777] In any of these combination and/or composition embodiments, one immune sustainer may be a cytokine or chemokine. In some immune sustainer and immune initiator combination and/or composition embodiments, one immune sustainer is a cytokine or chemokine and the immune initiator is a cytokine or chemokine. In some embodiments, one immune sustainer is a cytokine or chemokine and the immune initiator is a receptor ligand. In some embodiments, one immune sustainer is a cytokine or chemokine and the immune initiator is a single chain antibody. In some embodiments, one immune sustainer is a cytokine or chemokine and the immune initiator is a metabolic conversion. In some embodiments, one immune sustainer is a cytokine or chemokine and the immune initiator is an engineered chemotherapy. In some immune sustainer and immune initiator combination and/or composition embodiments, the immune sustainer is IL-15, or a fragment, variant or fusion protein thereof. In some immune sustainer and immune initiator combination and/or composition embodiments, the immune sustainer is CXCL10, or a fragment, variant or fusion protein thereof. In any of these embodiments, the immune initiator may be selected from TNFα, IFN-gamma, IFN-beta1, SIRPα, CD40L, STING agonist, and 5FC->5FU.

[0778] In any of these combination and/or composition embodiments, one immune sustainer may be a metabolic conversion. In some immune sustainer and immune initiator combination and/or composition embodiments, one immune sustainer is a metabolic conversion and the immune initiator is a cytokine or chemokine. In some embodiments, one immune sustainer is a metabolic conversion and the immune initiator is a receptor ligand. In some embodiments, one immune sustainer is a metabolic conversion and the immune initiator is a single chain antibody. In some embodiments, one immune sustainer is a metabolic conversion and the immune initiator is a metabolic conversion. In some embodiments, one immune sustainer is a metabolic conversion and the immune initiator is an engineered chemotherapy. In some immune sustainer and immune initiator combination and/or composition embodiments, the immune sustainer is kynurenine consumption. In some immune sustainer and immune initiator combination and/or composition embodiments, the immune sustainer is arginine production. In some immune sustainer and immune initiator combination and/or composition embodiments, the immune sustainer is adenosine consumption. In any of these embodiments, the immune initiator may be selected from TNFα, IFN-gamma, IFN-beta1, SIRPα, CD40L, STING agonist, and 5FC->5FU.

[0779] In any of these combination embodiments, the genetically engineered bacteria may comprise gene sequences encoding enzymes for the consumption of kynurenine (and optionally production of tryptophan) and gene sequences for the production of an immune initiator. In some embodiments, the genetically engineered bacteria comprise gene sequences encoding kynureninase and gene sequences for the production of an immune initiator. In some embodiments, the immune initiator combined with kynureninase is a chemokine or a cytokine. In some embodiments, the immune initiator combined with kynureninase is a single chain antibody. In some embodiments, the immune initiator combined with kynureninase is a receptor ligand. In some embodiments, the immune initiator combined with kynureninase is metabolic conversion, e.g., a STING agonist producer, e.g., diadenylate cyclase, e.g., dacA. In some embodiments, the immune initiator combined with kynureninase is an engineered chemotherapy, e.g., codA for the conversion of 5FC to 5FU. In some embodiments, the immune initiator is selected from TNFα, IFN-gamma, IFN-beta1, SIRPα, CD40L, STING agonist, and 5FC->5FU. In one embodiment, the genetically engineered bacteria comprise gene sequences encoding kynureninase and gene sequences encoding TNFα. In one embodiment, the genetically engineered bacteria comprise gene sequences encoding kynureninase and gene sequences encoding IFN-gamma. In one embodiment, the genetically engineered bacteria comprise gene sequences encoding kynureninase and gene sequences encoding IFN-beta1. In one embodiment, the genetically engineered bacteria comprise gene sequences encoding kynureninase and gene sequences encoding SIRPα or a variant thereof described herein. In one embodiment, the genetically engineered bacteria comprise gene sequences encoding kynureninase and gene sequences encoding CD40L. In one embodiment, the genetically engineered bacteria comprise gene sequences encoding kynureninase and gene sequences encoding an enzyme for the production of a STING agonist, e.g., dacA, for the production of cyclic-di-AMP. In one embodiment, the genetically engineered bacteria comprise gene sequences encoding kynureninase and gene sequences encoding an enzyme for the conversion of 5FC to 5FU, e.g., codA or a variant or fusion protein thereof. In any of these kynurenine consumption and immune initiator combination and/or composition embodiments, trpE may be deleted.

[0780] In any of these combination embodiments, the genetically engineered bacteria may comprise gene sequences encoding enzymes for the production of a STING agonist and gene sequences for the production of an immune sustainer. In some embodiments, the genetically engineered bacteria comprise gene sequences encoding e.g., diadenylate cyclase, e.g., dacA, and gene sequences for the production of an immune sustainer. In some embodiments, the immune sustainer combined with dacA is a chemokine or a cytokine. In some embodiments, the immune sustainer combined with dacA is a single chain antibody. In some embodiments, the immune sustainer combined with diadenylate cyclase, e.g., dacA is a receptor ligand. In some embodiments, the immune sustainer combined with diadenylate cyclase, e.g., dacA is metabolic conversion, e.g., an arginine producer, kynurenine consumer and/or adenosine consumer. In some embodiments, the immune sustainer is selected from anti-PD-1 antibody, anti-CTLA4 antibody, anti-PD-L1 antibody, IL-15, CXCL10, arginine producer, adenosine consumer, and kynurenine consumer. In one embodiment, the genetically engineered bacteria comprise gene sequences encoding dacA and gene sequences encoding an anti-PD-1 antibody. In one embodiment, the genetically engineered bacteria comprise gene sequences encoding diadenylate cyclase, e.g., dacA and gene sequences encoding anti-CTLA4 antibody. In one embodiment, the genetically engineered bacteria comprise gene sequences encoding dacA and gene sequences encoding IL-15. In one embodiment, the genetically engineered bacteria comprise gene sequences encoding diadenylate cyclase, e.g., dacA and gene sequences encoding CXCL10. In one embodiment, the genetically engineered bacteria comprise gene sequences encoding diadenylate cyclase, e.g., dacA and gene sequences encoding a circuitry for the production of arginine, e.g., as described herein. In one embodiment, the genetically engineered bacteria comprise gene sequences encoding diadenylate cyclase, e.g., dacA and gene sequences encoding an enzyme for the consumption of kynurenine, e.g., kynureninase, e.g., from Pseudomonas fluorescens. In one embodiment, the genetically engineered bacteria comprise gene sequences encoding diadenylate cyclase, e.g., dacA and gene sequences encoding an enzyme for the consumption adenosine, as described herein. In one embodiment, the gene sequences encoding the adenosine degradation pathway enzymes comprise one or more genes selected from xdhA, xdhB, xdhC, add, xapA, deoD, and nupC. In one embodiment, the gene sequences encoding the adenosine degradation pathway comprise xdhA, xdhB, xdhC, add, xapA, deoD, and nupC. In one embodiment, dacA is from Listeria monocytogenes.

[0781] In any of these composition embodiments, one or more different genetically engineered bacteria comprising gene sequences encoding enzymes for the consumption of kynurenine (and optionally production of tryptophan) may be combined with one or more different genetically engineered bacteria comprising gene sequences for the production of an immune initiator. In some embodiments, the one or more different genetically engineered bacteria of the composition comprising gene sequences encoding kynureninase are combined with one or more different genetically engineered bacteria comprising gene sequences for the production of an immune initiator. In some embodiments, the immune initiator combined with kynureninase is a chemokine or a cytokine. In some embodiments, the immune initiator combined with kynureninase is a single chain antibody. In some embodiments, the immune initiator combined with kynureninase is a receptor ligand. In some embodiments, the immune initiator combined with kynureninase is metabolic conversion, e.g., a STING agonist producer, e.g., diadenylate cyclase, e.g., dacA. In some embodiments, the immune initiator combined with kynureninase is an engineered chemotherapy, e.g., codA for the conversion of 5FC to 5FU. In some embodiments, the immune initiator is selected from TNFα, IFN-gamma, IFN-beta1, SIRPα, CD40L, STING agonist, and 5FC->5FU. In one embodiment, the one or more different genetically engineered bacteria comprise gene sequences encoding kynureninase and gene sequences encoding TNFα. In one embodiment, the one or more different genetically engineered bacteria of the composition comprising gene sequences encoding kynureninase are combined with one or more different genetically engineered bacteria comprising gene sequences encoding IFN-gamma. In one embodiment, the one or more different genetically engineered bacteria of the composition comprising gene sequences encoding kynureninase are combined with one or more different genetically engineered bacteria comprising gene sequences encoding IFN-beta1. In one embodiment, the one or more different genetically engineered bacteria of the composition comprising gene sequences encoding kynureninase are combined with one or more different genetically engineered bacteria comprising gene sequences encoding SIRPα or a variant thereof described herein. In one embodiment, the one or more different genetically engineered bacteria of the composition comprising gene sequences encoding kynureninase are combined with one or more different genetically engineered bacteria comprising gene sequences encoding CD40L. In one embodiment, the one or more different genetically engineered bacteria of the composition comprising gene sequences encoding kynureninase are combined with one or more different genetically engineered bacteria comprising gene sequences encoding an enzyme for the production of a STING agonist, e.g., dacA for the production of cyclic-di-AMP. In one embodiment, the one or more different genetically engineered bacteria of the composition comprising gene sequences encoding kynureninase are combined with one or more different genetically engineered bacteria comprising gene sequences encoding an enzyme for the conversion of 5FC to 5FU, e.g., codA or a variant or fusion protein thereof. In any of these kynurenine consumption and immune initiator combination and/or composition embodiments, trpE may be deleted.

[0782] In any of these composition embodiments, the one or more different genetically engineered bacteria which may comprise gene sequences encoding enzymes for the production of a STING agonist may be combined with one or more different genetically engineered bacteria comprising gene sequences for the production of an immune sustainer. In some embodiments, the one or more different genetically engineered bacteria of the composition comprising gene sequences encoding diadenylate cyclase, e.g., dacA are combined with one or more different genetically engineered bacteria comprising gene sequences for the production of an immune sustainer. In some embodiments, the immune sustainer combined with diadenylate cyclase, e.g., dacA is a chemokine or a cytokine. In some embodiments, the immune sustainer combined with dacA is a single chain antibody. In some embodiments, the immune sustainer combined with diadenylate cyclase, e.g., dacA is a receptor ligand. In some embodiments, the immune sustainer combined with diadenylate cyclase, e.g., dacA is metabolic conversion, e.g., an arginine producer, kynurenine consumer and/or adenosine consumer. In some embodiments, the immune sustainer is selected from anti-PD-1 antibody, anti-CTLA4 antibody, IL-15, CXCL10, arginine producer, adenosine consumer, and kynurenine consumer. In one embodiment, the one or more different genetically engineered bacteria of the composition comprising gene sequences encoding diadenylate cyclase, e.g., dacA are combined with one or more different genetically engineered bacteria comprising gene sequences encoding an anti-PD-1 antibody. In one embodiment, the one or more different genetically engineered bacteria of the composition comprising gene sequences encoding diadenylate cyclase, e.g., dacA are combined with one or more different genetically engineered bacteria comprising gene sequences encoding anti-CTLA4 antibody. In one embodiment, the one or more different genetically engineered bacteria of the composition comprising gene sequences encoding diadenylate cyclase, e.g., dacA are combined with one or more different genetically engineered bacteria comprising gene sequences encoding IL-15. In one embodiment, the one or more different genetically engineered bacteria of the composition comprising gene sequences encoding diadenylate cyclase, e.g., dacA are combined with one or more different genetically engineered bacteria comprising gene sequences encoding CXCL10. In one embodiment, the one or more different genetically engineered bacteria of the composition comprising gene sequences encoding diadenylate cyclase, e.g., dacA are combined with one or more different genetically engineered bacteria comprising gene sequences encoding a circuitry for the production of arginine, e.g., as described herein. In one embodiment, the one or more different genetically engineered bacteria of the composition comprising gene sequences encoding diadenylate cyclase, e.g., dacA are combined with one or more different genetically engineered bacteria comprising gene sequences encoding an enzyme for the consumption of kynurenine, e.g., kynureninase, e.g., from Pseudomonas fluorescens. In one embodiment, the one or more different genetically engineered bacteria of the composition comprising gene sequences encoding dacA are combined with one or more different genetically engineered bacteria comprising gene sequences encoding an enzyme for the consumption adenosine, as described herein. In one embodiment, the gene sequences encoding the adenosine degradation pathway enzymes comprise one or more genes selected from xdhA, xdhB, xdhC, add, xapA, deoD, and nupC. In one embodiment, the gene sequences encoding the adenosine degradation pathway comprise xdhA, xdhB, xdhC, add, xapA, deoD, and nupC. In one embodiment, dacA is from Listeria monocytogenes.

[0783] Any one or more immune initiator(s) may be combined with any one or more immune sustainer(s) in the cancer immunity cycle. Accordingly, in some embodiments, the genetically engineered bacteria are capable of producing one or more immune initiators which modulate, e.g., intensify, one or more of steps of the cancer immunity cycle (1) oncolysis, (2) activation of APCs and/or (3) priming and activation of T cells in combination with one or more immune sustainers, which modulate, e.g., boost, one or more of steps (4) T cell trafficking and infiltration, (5) recognition of cancer cells by T cells and/or T cell support and/or (6) the ability to overcome immune suppression. Non-limiting examples of immune initiators which modulate steps (1), (2), an (3) are provided herein. Non-limiting examples of immune sustainers which modulate steps (4), (5), an (6) are provided herein. Accordingly, any of these exemplary immune modulators may part of an immune initiator/immune sustainer combination which is capable of modulating one or more cancer immunity cycle steps as described herein. Accordingly, genetically engineered bacteria comprising gene sequences encoding combinations of immune initiator(s)/immune sustainer(s) can modulate combinations of cancer immunity cycle step, e.g., as follows: step (1), step (2), step (3), step (4), step (5), step (6); step (1), step (2), step (3), step (4), step (5); step (1), step (2), step (3), step (4), step (6); step (1), step (2), step (3), step (5), step (6); step (1), step (2), step (3), step (4); step (1), step (2), step (3), step (5); step (1), step (2), step (3), step (6); step (1), step (2), step (4), step (5), step (6); step (1), step (2), step (4), step (5); step (1), step (2), step (4), step (6); step (1), step (2), step (5), step (6); step (1), step (2), step (4); step (1), step (2), step (5); step (1), step (2), step (6); step (1), step (3), step (4), step (5), step (6); step (1), step (3), step (4), step (5); step (1), step (3), step (4), step (6); step (1), step (3), step (5), step (6); step (1), step (3), step (4); step (1), step (3), step (5); step (1), step (3), step (6); step (2), step (3), step (4), step (5), step (6); step (2), step (3), step (4), step (5); step (2), step (3), step (4), step (6); step (2), step (3), step (5), step (6); step (2), step (3), step (4); step (2), step (3), step (5); step (2), step (3), step (6); step (1), step (4), step (5), step (6); step (1), step (4), step (5); step (1), step (4), step (6); step (1), step (5), step (6); step (1), step (4); step (1), step (5); step (1), step (6); step (2), step (4), step (5), step (6); step (2), step (4), step (5); step (2), step (4), step (6); step (2), step (5), step (6); step (2), step (4); step (2), step (5); step (2), step (6); step (3), step (4), step (5), step (6); step (3), step (4), step (5); step (3), step (4), step (6); step (3), step (5), step (6); step (3), step (4); step (3), step (5); step (3), step (6).

[0784] In some embodiments, the genetically engineered bacteria of the invention produce the immune initiator and/or immune sustainer under low-oxygen conditions and are capable of reducing cell proliferation, tumor growth, and/or tumor volume by at least about 10% to 20%, 20% to 25%, 25% to 30%, 30% to 40%, 40% to 50%, 50% to 60%, 60% to 70%, 70% to 75%, 75% to 80%, 80% to 85%, 85% to 90%, 90% to 95%, 95% to 99%, or more as compared to an unmodified bacteria of the same subtype under the same conditions.

[0785] In some embodiments, the genetically engineered bacteria of the invention produce the immune initiator and/or immune sustainer under the control of a constitutive promoter and are capable of reducing cell proliferation, tumor growth, and/or tumor volume by at least about 10% to 20%, 20% to 25%, 25% to 30%, 30% to 40%, 40% to 50%, 50% to 60%, 60% to 70%, 70% to 75%, 75% to 80%, 80% to 85%, 85% to 90%, 90% to 95%, 95% to 99%, or more as compared to an unmodified bacteria of the same subtype under the same conditions.

[0786] The circuit encoding the immune initiators or immune sustainers may be under the control of a constitutive or inducible promoter, e.g., low oxygen inducible promoter or any other constitutive or inducible promoter described herein. In any of these embodiments, the gene sequence(s) encoding immune initiators or immune sustainers may be combined with gene sequence(s) encoding one or more STING agonist producing enzymes, as described herein, in the same or a different bacterial strain (combination circuit or mixture of strains). In some embodiments, the gene sequences which are combined with the gene sequence(s) encoding immune initiators or immune sustainers encode DacA. DacA may be under the control of a constitutive or inducible promoter, e.g., low oxygen inducible promoter such as FNR or any other constitutive or inducible promoter described herein. In some embodiments, the dacA gene is integrated into the chromosome. In some embodiments, the gene sequences which are combined with the gene sequence(s) encoding immune initiators or immune sustainers immune initiators or immune sustainers encode cGAS. cGAS may be under the control of a constitutive or inducible promoter, e.g., low oxygen inducible promoter such as FNR or any other constitutive or inducible promoter described herein. In some embodiments, the gene encoding cGAS is integrated into the chromosome. In any of these combination embodiments, the bacteria may further comprise an auxotrophic modification, e.g., a mutation or deletion in DapA, ThyA, or both. In any of these embodiments, the bacteria may further comprise a phage modification, e.g., a mutation or deletion, in an endogenous prophage as described herein.

[0787] In any of these embodiments and all combination embodiments, a engineered bacteria can be used in conjunction with conventional cancer therapies, such as surgery, chemotherapy, targeted therapies, radiation therapy, tomotherapy, immunotherapy, cancer vaccines, hormone therapy, hyperthermia, stem cell transplant (peripheral blood, bone marrow, and cord blood transplants), photodynamic therapy, oncolytic virus therapy, and blood product donation and transfusion. In any of these embodiments for producing an immune modulators, one or more engineered bacteria can be used in conjunction with other conventional immunotherapies used to treat cancer, such as checkpoint inhibitors, Fc-mediated ADCC, BiTE, TCR, adoptive cell therapy (TILs, CARs, NK/NKT, etc.), and any of the other immunotherapies described herein and otherwise known in the art. In any of these embodiments, the engineered bacteria can be used in conjunction with a cancer or tumor vaccine.

### Combinations of Immune Initiators and Immune Initiators

[0788] In some embodiments, the genetically engineered bacteria are capable of producing two or more initiators which modulate, e.g., intensify, one or more of steps (1), (2), and/or (3). Alternatively, the disclosure provides a composition comprising a combination (e.g., two or more) of different genetically engineered bacteria, each bacteria encoding one or more immune initiators. In yet another embodiment, the disclosure provides for the administration of an immune initiator, in combination with, e.g., before, at the same time as, or after, a modified microorganism capable of producing an immune initiator. Such distinct or different combinations and/or bacterial strains can be administered concurrently or sequentially. Regardless of the sequence or timing of the administration (concurrent or sequential), engineered strains may express the circuitry for the immune sustainer sequentially or concurrently upon administration, i.e., timing and levels of expression are tuned using one or more mechanisms described herein, including but not limited to promoters and ribosome binding sites.

[0789] In some embodiments of the disclosure, in which a microorganism genetically engineered to express two or more immune initiator circuits, the microorganism first produces higher levels of a first immune stimulator and at a later time point a second immune initiator. In some embodiments of the disclosure, in which a microorganism genetically engineered to express two or more immune initiator circuits, the microorganism produces a first immune stimulator and a second immune initiator concurrently. In certain embodiments, the one or more gene sequences are under the control of inducible promoters known in the art or described herein. For example, such inducible promoters may be induced under low-oxygen conditions, such as an FNR promoter. In some embodiments, the one or more gene sequence(s) encoding the immune initiators are operably linked to a directly or indirectly inducible promoter that is induced under inflammatory conditions (e.g., RNS, ROS), as described herein. In other embodiments, the promoters are induced in the presence of certain molecules or metabolites, e.g., in the presence of molecules or metabolites associated with the tumor microenvironment and/or with immune suppression. In some embodiments, the promoters are induced in certain tissue types. In some embodiments, promoters are induced in the presence of certain gut-specific or tumor-specific molecules or metabolites. In some embodiments, the promoters are induced in the presence of some other metabolite that may or may not be present in the gut or the tumor, such as arabinose, cumate, and salicylate or another chemical or nutritional inducer known in the art or described herein. In certain embodiments, the two or more immune initiator circuits are under the control of constitutive promoters described herein or known in the art, e.g., whose expression can be fine-tuned using ribosome binding sites of different strengths. Such microorganisms optionally also comprise an auxotrophic modification, e.g., an auxotrophic modification in amino acid or nucleotide metabolism. Non-limiting examples include ΔDapA or ΔThyA or both.

[0790] Promoters controlling expression of the two or more immune initiators may be the same or different and may be induced by the same chemical or environmental inducer or a different chemical or environmental inducers. First inducer and second inducer may be administered sequentially or concurrently. In some embodiments, one initiator is under the control of a low oxygen promoter. In some embodiments, both initiators are under control of a low oxygen promoter. In some embodiments, one initiator is under control of a constitutive promoter. In some embodiments, both initiators are under control of a constitutive promoter.

[0791] In some embodiments both circuits may be integrated into the bacterial chromosome. In some embodiments, both circuits may be present on a plasmid. In some embodiments both circuits may be present on a plasmid. In some embodiments one circuit may be integrated into the bacterial chromosome and another circuit may be present on a plasmid.

[0792] Any immune initiator may be combined with one or more additional same or different immune initiator(s), which modulate the same or a different step in the cancer immunity cycle.

[0793] In some embodiments, the genetically engineered bacteria are capable of producing one or more immune initiators, which modulate, e.g., intensify, one or more of steps (1) Lysis of tumor cells, (2), activation of APCs and/or (3) priming and activation of T cells. In some embodiments, the genetically engineered bacteria are capable of producing two or more initiators which modulate, e.g., intensify, one or more of steps (1), (2), and/or (3). In some embodiments, the genetically engineered bacteria produce two or more immune initiators, which modulate, e.g., intensify, the same step of the cancer immunity cycle. In one example, the genetically engineered bacteria produce two or more immune initiators which modulate oncolysis (step (1)). In one example, the genetically engineered bacteria produce two or more immune initiators which modulate activation of APCs (step (2)). In one example, the genetically engineered bacteria produce two or more immune initiators which modulate, e.g., enhance, priming and activation of T cells (step (3)). In some embodiments, the genetically engineered bacteria produce two or more immune initiators, which modulate, e.g., intensify, the same step. In a non-limiting example, the genetically engineered bacteria produce one or more immune initiators which modulate, e.g., intensify oncolysis (step (1)) and one or more immune initiators which modulate, e.g., intensify activation of APCs (step (2)). In another non-limiting example, the genetically engineered bacteria produce one or more immune initiators which modulate, e.g., intensify oncolysis (step (1)) and one or more immune initiators which modulate, e.g., intensify priming and activation of T cells (step (3)). In another non-limiting example, the genetically engineered bacteria produce one or more immune initiators which modulate, e.g., intensify activation of APCs (step (2)) and one or more immune initiators which modulate, e.g., intensify priming and activation of T cells (step (3)). In yet another non-limiting example, the genetically engineered bacteria produce one or more immune initiators which modulate, e.g., intensify step (1) Oncolysis, one or more immune initiators which modulate, e.g., intensify activation of APCs (step (2)), and one or more immune initiators which modulate, e.g., intensify priming and activation of T cells (step (3)).

[0794] In some embodiments, the genetically engineered bacteria comprise gene circuitry for the production of or more immune initiators, which modulate, e.g., intensify, one or more of steps (1) oncolysis, (2) activation of APCs and/or (3) priming and activation of T cells. In some embodiments, the genetically engineered bacteria comprise one or more genes encoding one or more immune initiators, which modulate, e.g., intensify, one or more of steps (1) oncolysis, (2) activation of APCs and/or (3) priming and activation of T cells. Any immune initiator may be combined with another immune initiator, which modulates the same or a different step. In some embodiments, the genetically engineered bacteria comprise gene sequence(s) encoding two or more initiators which modulate, e.g., intensify, one or more of steps (1) oncolysis, (2) activation of APCs, and/or (3) priming and activation of T cells. In some embodiments, the genetically engineered bacteria comprise gene sequence(s) encoding two or more immune initiators, which modulate, e.g., intensify, the same step. In one example, the genetically engineered bacteria comprise gene sequence(s) encoding two or more immune initiators which modulate step (1) lysis of tumor cells (oncolysis). In one example, the genetically engineered bacteria comprise gene sequence(s) encoding two or more immune initiators which modulate activation of APCs (step (2)). In one example, the genetically engineered bacteria comprise gene sequence(s) encoding two or more immune initiators which modulate priming and activation of T cells (step (3)). In some embodiments, the genetically engineered bacteria comprise gene sequence(s) encoding two or more immune initiators, which modulate, e.g., intensify, the same step. In a non-limiting example, the genetically engineered bacteria comprise gene sequence(s) encoding one or more immune initiators which modulate, e.g., intensify, oncolysis (step (1)) and one or more immune initiators which modulate, e.g., intensify activation of APCs (step (2)). In another non-limiting example, the genetically engineered bacteria comprise gene sequence(s) encoding one or more immune initiators which modulate, e.g., intensify, oncolysis (step (1)) and one or more immune initiators which modulate, e.g., intensify, priming and activation of T cells (step (3)). In another non-limiting example, the genetically engineered bacteria comprise gene sequence(s) encoding one or more immune initiators which modulate, e.g., intensify, activation of APCs (step (2)) and one or more immune initiators which modulate, e.g., intensify, priming and activation of T cells (step (3)). In yet another non-limiting example, the genetically engineered bacteria comprise gene sequence(s) encoding one or more immune initiators which modulate, e.g., intensify, oncolysis (step (1)), one or more immune initiators which modulate, e.g., intensify, activation of APCs (step (2)), and one or more immune initiators which modulate, e.g., intensify, priming and activation of T cells (step (3)).

[0795] In some embodiments, the genetically engineered bacteria of the invention produce two or more immune initiators under low-oxygen conditions and are capable of reducing cell proliferation, tumor growth, and/or tumor volume by at least about 10% to 20%, 20% to 25%, 25% to 30%, 30% to 40%, 40% to 50%, 50% to 60%, 60% to 70%, 70% to 75%, 75% to 80%, 80% to 85%, 85% to 90%, 90% to 95%, 95% to 99%, or more as compared to an unmodified bacteria of the same subtype under the same conditions.

[0796] In some embodiments, the genetically engineered bacteria of the invention produce the two or more immune initiators under the control of a constitutive promoter and are capable of reducing cell proliferation, tumor growth, and/or tumor volume by at least about 10% to 20%, 20% to 25%, 25% to 30%, 30% to 40%, 40% to 50%, 50% to 60%, 60% to 70%, 70% to 75%, 75% to 80%, 80% to 85%, 85% to 90%, 90% to 95%, 95% to 99%, or more as compared to an unmodified bacteria of the same subtype under the same conditions.

[0797] In any of these embodiments and all combination embodiments, a engineered bacteria can be used in conjunction with conventional cancer therapies, such as surgery, chemotherapy, targeted therapies, radiation therapy, tomotherapy, immunotherapy, cancer vaccines, hormone therapy, hyperthermia, stem cell transplant (peripheral blood, bone marrow, and cord blood transplants), photodynamic therapy, oncolytic virus therapy, and blood product donation and transfusion.

[0798] The circuit encoding the immune initiators may be under the control of a constitutive or inducible promoter, e.g., low oxygen inducible promoter or any other constitutive or inducible promoter described herein.

[0799] In any of these embodiments, the gene sequence(s) encoding the immune initiators may be combined with gene sequence(s) encoding one or more STING agonist producing enzymes, as described herein, in the same or a different bacterial strain (combination circuit or mixture of strains). In some embodiments, the gene sequences which are combined with the gene sequence(s) encoding the immune initiators encode DacA. DacA may be under the control of a constitutive or inducible promoter, e.g., low oxygen inducible promoter such as FNR or any other constitutive or inducible promoter described herein. In some embodiments, the dacA gene is integrated into the chromosome. In some embodiments, the gene sequences which are combined with the gene sequence(s) encoding the immune initiators encode cGAS. cGAS may be under the control of a constitutive or inducible promoter, e.g., low oxygen inducible promoter such as FNR or any other constitutive or inducible promoter described herein. In some embodiments, the gene encoding cGAS is integrated into the chromosome.

[0800] In any of these combination embodiments, the bacteria may further comprise an auxotrophic modification, e.g., a mutation or deletion in DapA, ThyA, or both. In any of these embodiments, the bacteria may further comprise a phage modification, e.g., a mutation or deletion, in an endogenous prophage as described herein.

[0801] In any of these embodiments for producing an immune modulator, one or more engineered bacteria can be used in conjunction with other conventional immunotherapies used to treat cancer, such as checkpoint inhibitors, Fc-mediated ADCC, BiTE, TCR, adoptive cell therapy (TILs, CARs, NK/NKT, etc.), and any of the other immunotherapies described herein and otherwise known in the art. In any of these embodiments, the engineered bacteria can be used in conjunction with a cancer or tumor vaccine.

### Combinations of Immune Sustainers and Immune Sustainers

[0802] In some embodiments, the genetically engineered bacteria are capable of producing two or more sustainers which modulate, e.g., intensify, one or more of steps (1), (2), and/or (3). Alternatively, the disclosure provides a composition comprising a combination (e.g., two or more) of different genetically engineered bacteria, each bacteria encoding one or more immune sustainers. In yet another embodiment, the disclosure provides for the administration of an immune sustainer in combination with, e.g., before, at the same time as, or after, a modified microorganism capable of producing an immune sisatomer. Such distinct or different combinations or bacterial strains can be administered concurrently or sequentially. Regardless of the sequence or timing of the administration (concurrent or sequential), engineered strains may express the circuitry for the immune sustainer sequentially or concurrently upon administration, i.e., timing and levels of expression are tuned using one or more mechanisms described herein, including but not limited to promoters and ribosome binding sites.

[0803] In some embodiments of the disclosure, in which a microorganism genetically engineered to express two or more immune sustainer circuits, the microorganism first produces higher levels of a first immune stimulator and at a later time point a second immune sustainer. In some embodiments of the disclosure, in which a microorganism genetically engineered to express two or more immune sustainer circuits, the microorganism produces a first immune stimulator and a second immune sustainer concurrently. In certain embodiments, the one or more gene sequences are under the control of inducible promoters known in the art or described herein. For example, such inducible promoters may be induced under low-oxygen conditions, such as an FNR promoter. In some embodiments, the one or more gene sequence(s) encoding the immune sustainers are operably linked to a directly or indirectly inducible promoter that is induced under inflammatory conditions (e.g., RNS, ROS), as described herein. In other embodiments, the promoters are induced in the presence of certain molecules or metabolites, e.g., in the presence of molecules or metabolites associated with the tumor microenvironment and/or with immune suppression. In some embodiments, the promoters are induced in certain tissue types. In some embodiments, promoters are induced in the presence of certain gut-specific or tumor-specific molecules or metabolites. In some embodiments, the promoters are induced in the presence of some other metabolite that may or may not be present in the gut or the tumor, such as arabinose, cumate, and salicylate or another chemical or nutritional inducer known in the art or described herein. In certain embodiments, the two or more immune sustainer circuits are under the control of constitutive promoters described herein or known in the art, e.g., whose expression can be fine-tuned using ribosome binding sites of different strengths. Such microorganisms optionally also comprise an auxotrophic modification, e.g., an auxotrophic modification in amino acid aor a nucleotide metabolism, such as ΔDapA or ΔThyA or both.

[0804] Promoters controlling expression of the two or more immune sustainers may be the same or different and may be induced by the same chemical or environmental inducer or a different chemical or environmental inducers. First inducer and second inducer may be administered sequentially or concurrently. In some embodiments, one sustainer is under the control of a low oxygen promoter. In some embodiments, both sustainers are under control of a low oxygen promoter. In some embodiments, one sustainer is under control of a constitutive promoter. In some embodiments, both sustainers are under control of a constitutive promoter.

[0805] In some embodiments both circuits may be integrated into the bacterial chromosome. In some embodiments, both circuits may be present on a plasmid. In some embodiments both circuits may be present on a plasmid. In some embodiments one circuit may be integrated into the bacterial chromosome and another circuit may be present on a plasmid.

[0806] In some embodiments, the genetically engineered bacteria are capable of producing one or more immune sustainers, which modulate, e.g., boost, one or more of steps (4) T cell trafficking and infiltration, (5) recognition of cancer cells by T cells and/or T cell support and/or (6) the ability to overcome immune suppression. Any immune sustainer may be combined with another immune sustainer, which modulates the same or a different step. In some embodiments, the genetically engineered bacteria are capable of producing two or more sustainers which modulate, e.g., boost, one or more of steps (4), (5), and/or (6). In some embodiments, the genetically engineered bacteria produce two or more immune sustainers, which modulate, e.g., boost, the same step. In one example, the genetically engineered bacteria produce two or more immune sustainers which modulate T cell trafficking and infiltration (step (4)). In one example, the genetically engineered bacteria produce two or more immune sustainers which modulate step (5) recognition of cancer cells by T cells and/or T cell support. In one example, the genetically engineered bacteria produce two or more immune sustainers which modulate, e.g., enhance, the ability to overcome immune suppression (step (6)). In some embodiments, the genetically engineered bacteria produce two or more immune sustainers, which modulate, e.g., boost, the same step. In a non-limiting example, the genetically engineered bacteria produce one or more immune sustainers which modulate, e.g., boost, T cell trafficking and infiltration (step (4)) and one or more immune sustainers which modulate, e.g., boost recognition of cancer cells by T cells and/or T cell support (step (5)). In another non-limiting example, the genetically engineered bacteria produce one or more immune sustainers which modulate, e.g., boost, T cell trafficking and infiltration (step (4)) and one or more immune sustainers which modulate, e.g., boost, the ability to overcome immune suppression (step (6)). In another non-limiting example, the genetically engineered bacteria produce one or more immune sustainers which modulate, e.g., boost recognition of cancer cells by T cells and/or T cell support (step (5)) and one or more immune sustainers which modulate, e.g., boost the ability to overcome immune suppression (step (6)). In yet another non-limiting example, the genetically engineered bacteria produce one or more immune sustainers which modulate, e.g., boost, step (4) T cell trafficking and infiltration, one or more immune sustainers which modulate, e.g., boost, recognition of cancer cells by T cells and/or T cell support (step (5)), and one or more immune sustainers which modulate, e.g., boost the ability to overcome immune suppression (step (6)).

[0807] In some embodiments, the genetically engineered bacteria comprise gen circuitry for the production of one or more immune sustainers, which modulate, e.g., boost, one or more of steps (4) T cell trafficking and infiltration, (5) recognition of cancer cells by T cells and/or T cell support and/or (6) the ability to overcome immune suppression. In some embodiments, the genetically engineered bacteria comprise one or more genes encoding one or more immune sustainers, which modulate, e.g., boost, one or more of steps (4) T cell trafficking and infiltration, (5) recognition of cancer cells by T cells and/or T cell support and/or (6) the ability to overcome immune suppression. In some embodiments, the genetically engineered bacteria comprise gene sequence(s) encoding two or more sustainers which modulate, e.g., boost, one or more of steps (4) T cell trafficking and infiltration, (5) recognition of cancer cells by T cells and/or T cell support, and/or (6) the ability to overcome immune suppression. In some embodiments, the genetically engineered bacteria comprise gene sequence(s) encoding two or more immune sustainers, which modulate, e.g., boost, the same step. In one example, the genetically engineered bacteria comprise gene sequence(s) encoding two or more immune sustainers which modulate T cell trafficking and infiltration (step (4)). In one example, the genetically engineered bacteria comprise gene sequence(s) encoding two or more immune sustainers which modulate recognition of cancer cells by T cells and/or T cell support (step (5)). In one example, the genetically engineered bacteria comprise gene sequence(s) encoding two or more immune sustainers which modulate the ability to overcome immune suppression (step (6)). In some embodiments, the genetically engineered bacteria comprise gene sequence(s) encoding two or more immune sustainers, which modulate, e.g., boost, the same step. In a non-limiting example, the genetically engineered bacteria comprise gene sequence(s) encoding one or more immune sustainers which modulate, e.g., boost, T cell trafficking and infiltration (step (4)) and one or more immune sustainers which modulate, e.g., boost recognition of cancer cells by T cells and/or T cell support (step (5)). In another non-limiting example, the genetically engineered bacteria comprise gene sequence(s) encoding one or more immune sustainers which modulate, e.g., boost, T cell trafficking and infiltration (step (4)) and one or more immune sustainers which modulate, e.g., boost, the ability to overcome immune suppression (step (6)). In another non-limiting example, the genetically engineered bacteria comprise gene sequence(s) encoding one or more immune sustainers which modulate, e.g., boost, recognition of cancer cells by T cells and/or T cell support (step (5)) and one or more immune sustainers which modulate, e.g., boost, the ability to overcome immune suppression (step (6)). In yet another non-limiting example, the genetically engineered bacteria comprise gene sequence(s) encoding one or more immune sustainers which modulate, e.g., boost, T cell trafficking and infiltration (step (4)), one or more immune sustainers which modulate, e.g., boost, recognition of cancer cells by T cells and/or T cell support (step (5)), and one or more immune sustainers which modulate, e.g., boost, the ability to overcome immune suppression (step (6)).

[0808] In some embodiments, the genetically engineered bacteria of the invention produce the two or more immune sustainers under low-oxygen conditions and are capable of reducing cell proliferation, tumor growth, and/or tumor volume by at least about 10% to 20%, 20% to 25%, 25% to 30%, 30% to 40%, 40% to 50%, 50% to 60%, 60% to 70%, 70% to 75%, 75% to 80%, 80% to 85%, 85% to 90%, 90% to 95%, 95% to 99%, or more as compared to an unmodified bacteria of the same subtype under the same conditions.

[0809] In some embodiments, the genetically engineered bacteria of the invention produce the two or more immune sustainers under the control of a constitutive promoter and are capable of reducing cell proliferation, tumor growth, and/or tumor volume by at least about 10% to 20%, 20% to 25%, 25% to 30%, 30% to 40%, 40% to 50%, 50% to 60%, 60% to 70%, 70% to 75%, 75% to 80%, 80% to 85%, 85% to 90%, 90% to 95%, 95% to 99%, or more as compared to an unmodified bacteria of the same subtype under the same conditions.

[0810] The circuit encoding the immune sustainers may be under the control of a constitutive or inducible promoter, e.g., low oxygen inducible promoter or any other constitutive or inducible promoter described herein.

[0811] In any of these embodiments, the gene sequence(s) encoding the immune sustainers may be combined with gene sequence(s) encoding one or more STING agonist producing enzymes, as described herein, in the same or a different bacterial strain (combination circuit or mixture of strains). In some embodiments, the gene sequences which are combined with the gene sequence(s) encoding the immune sustainers encode DacA. DacA may be under the control of a constitutive or inducible promoter, e.g., low oxygen inducible promoter such as FNR or any other constitutive or inducible promoter described herein. In some embodiments, the dacA gene is integrated into the chromosome. In some embodiments, the gene sequences which are combined with the gene sequence(s) encoding the immune sustainers encode cGAS. cGAS may be under the control of a constitutive or inducible promoter, e.g., low oxygen inducible promoter such as FNR or any other constitutive or inducible promoter described herein. In some embodiments, the gene encoding cGAS is integrated into the chromosome.

[0812] In any of these combination embodiments, the bacteria may further comprise an auxotrophic modification, e.g., a mutation or deletion in DapA, ThyA, or both. In any of these embodiments, the bacteria may further comprise a phage modification, e.g., a mutation or deletion, in an endogenous prophage as described herein.

[0813] In any of these embodiments and all combination embodiments, a engineered bacteria can be used in conjunction with conventional cancer therapies, such as surgery, chemotherapy, targeted therapies, radiation therapy, tomotherapy, immunotherapy, cancer vaccines, hormone therapy, hyperthermia, stem cell transplant (peripheral blood, bone marrow, and cord blood transplants), photodynamic therapy, oncolytic virus therapy, and blood product donation and transfusion. In any of these embodiments for producing an immune modulator, one or more engineered bacteria can be used in conjunction with other conventional immunotherapies used to treat cancer, such as checkpoint inhibitors, Fc-mediated ADCC, BiTE, TCR, adoptive cell therapy (TILs, CARs, NK/NKT, etc.), and any of the other immunotherapies described herein and otherwise known in the art. In any of these embodiments, the engineered bacteria can be used in conjunction with a cancer or tumor vaccine.

### STING Agonist Combinations

### STING Agonists and Kynurenine Consumption

[0814] In one embodiment, the genetically engineered bacteria comprise one or more genes encoding enzymes for the production of STING agonist(s) in combination with one or more genes encoding enzymes for the consumption of kynurenine. In one embodiment, the STING agonist produced is c-di-AMP. In one embodiment, the genetically engineered bacteria comprises gene sequences encoding a diadenylate cyclase in combination with gene sequences encoding a kynureninase. In one embodiment, the diadenylate cyclase is from Listeria monocytogenes. In one embodiment, the kynureninase is from Pseudomonas fluorescens. In one specific embodiment, the diadenylate cyclase is from Listeria monocytogenes and the kynureninase is from Pseudomonas fluorescens. In one embodiment, the STING agonist produced is cyclic-di-GAMP. In one embodiment, the genetically engineered bacteria comprises gene sequences encoding a c-di-GAMP synthase in combination with gene sequences encoding a kynureninase. In one embodiment, the c-di-GAMP synthases is from Vibrio cholerae. In some embodiments, the cGAS is the human cGAS. In one embodiment, the kynureninase is from Pseudomonas fluorescens. In one specific embodiment, the c-di-GAMP synthase is from Vibrio cholerae and the kynureninase is from Pseudomonas fluorescens. In one specific embodiment, the c-di-GAMP synthase is human cGAS and the kynureninase is from Pseudomonas fluorescens. In one specific embodiment, the kynureninase from Pseudomonas fluorescens is chromosomally integrated and under control of a constitutive promoter.

[0815] In some embodiments, the microorganism of the disclosure is genetically engineered to express gene sequence(s) encoding one or more enzymes for the production of a STING agonist and additionally one or more gene sequence(s) for the expression of a kynurenine consuming enzyme. Non limiting examples of such enzymes for the production of STING agonists include dacA, e.g., from Listeria monocytogenes. Non-limiting examples of such kynurenine consuming enzymes include kynureninase (e.g., kynureninase from Pseudomonas fluorescens). More generally, immune initiator circuits (STING agonist producer or others described herein) may be combined with immune sustainer circuits (e.g., kynurenine consumption or others described herein).

[0816] In some embodiments of the disclosure, in which a microorganism genetically engineered to express an STING agonist and a kynurenine consumption circuit, the microorganism first produces higher levels of STING agonist producing enzyme e.g., DacA, e.g., from Listeria monocytogenes and at a later time point produces kynureninase, e.g., from Pseudomonas fluorescens). In some embodiments, expression of the STING agonist producing enzyme, e.g., dacA, is induced by an inducer. In some embodiments, kynureninase) is induced by an inducer. In some embodiments, STING agonist producing enzyme, e.g., dacA, and kynureninase are induced by one or more inducer(s). A first inducer (e.g., inducing dacA expression) and a second inducer (e.g., inducing kynureninase expression) may be the same or different inducers. First and second inducer may be administered sequentially or concurrently. Non-limiting examples of inducers include conditions of the gut or tumor microenvironment (e.g., low oxygen, certain nutrients, etc.), certain in vitro conditions during cell culture, or chemical inducers (e.g., arabinose, cumate, and salicylate, IPTG or other chemical inducers described herein), which can be added in vitro or in vivo. In other embodiments, both STING agonist producing enzyme, e.g., dacA) and kynureninase) are controlled by or directly or indirectly linked to constitutive promoters, including but not limited to those described herein. In some embodiments, the STING agonist producing enzyme, e.g., dacA) is controlled by or directly or indirectly linked to an inducible promoter and the kynureninase is controlled by or directly or indirectly linked to a constitutive promoter. In some embodiments, the STING agonist producing enzyme, e.g., dacA is controlled by or directly or indirectly linked to an constitutive promoter and the kynureninase is controlled by or directly or indirectly linked to an inducible promoter. In some embodiments, both circuits may be integrated into the bacterial chromosome. In some embodiments, both circuits may be present on a plasmid. In some embodiments, both circuits may be present on a plasmid. In some embodiments, one circuit may be integrated into the bacterial chromosome and another circuit may be present on a plasmid.

[0817] In yet another embodiment, one or more strain(s) of genetically engineered bacteria expressing STING agonist producing circuitry, e.g., dacA, and one or more separate strain(s) genetically engineered bacteria expressing kynurenine consumption circuitry (e.g., kynureninase) may be administered sequentially, e.g., STING agonist producer may be administered before kynurenine consumer. In other embodiments, STING agonist producer may be administered after kynurenine consumer. In yet another embodiment, STING agonist producer may be administered concurrently with the kynurenine consumer.

[0818] In alternate embodiments, the disclosure provides a composition comprising a combination (e.g., two or more) of different genetically engineered bacteria, each bacteria encoding a different immune modulator. In one embodiment, the composition comprises genetically engineered bacteria comprising one or more genes encoding enzymes for the production of STING agonist(s) and genetically engineered bacteria comprising one or more genes encoding enzymes for the consumption of kynurenine. In one embodiment, the STING agonist produced is c-di-AMP. In one embodiment, the composition comprises genetically engineered bacteria comprising gene sequences encoding a diadenylate cyclase and genetically engineered bacteria comprising gene sequences encoding a kynureninase. In one embodiment, the diadenylate cyclase is from Listeria monocytogenes. In one embodiment, the kynureninase is from Pseudomonas fluorescens. In one specific embodiment, the diadenylate cyclase is from Listeria monocytogenes and the kynureninase is from Pseudomonas fluorescens. In one embodiment, the STING agonist produced is cyclic-di-GAMP. In one embodiment, the composition comprises genetically engineered bacteria comprising gene sequences encoding a c-di-GAMP synthase and genetically engineered bacteria comprising gene sequences encoding a kynureninase. In one embodiment, the c-di-GAMP synthases is from Vibrio cholerae. In one specific embodiment, the c-di-GAMP synthase is from Vibrio cholerae and the kynureninase is from Pseudomonas fluorescens. IN some embodiments, the genetically engineered bacteria comprise sequences for the production of human cGAS. In one embodiment, the kynureninase is from Pseudomonas fluorescens. In one specific embodiment, the c-di-GAMP synthase is human cGAS and the kynureninase is from Pseudomonas fluorescens. In one specific embodiment, the kynureninase from Pseudomonas fluorescens is chromosomally integrated and under control of a constitutive promoter.

[0819] In any of these STING agonist production and kynurenine consumption embodiments, the genetically engineered bacteria produce at least about 0% to 2% to 4%, 4% to 6%,6% to 8%, 8% to 10%, 10% to 12%, 12% to 14%, 14% to 16%, 16% to 18%, 18% to 20%, 20% to 25%,25% to 30%, 30% to 35%, 35% to 40%,40% to 45% 45% to 50%, 50% to 55%, 55% to 60%, 60% to 65%, 65% to 70% to 80%, 80% to 90%, or 90% to 100% more STING agonist, e.g., cyclic-di-AMP, than unmodified bacteria of the same bacterial subtype under the same conditions.

[0820] In any of these STING agonist production and kynurenine consumption embodiments, the genetically engineered bacteria consume 0% to 2% to 4%, 4% to 6%,6% to 8%, 8% to 10%, 10% to 12%, 12% to 14%, 14% to 16%, 16% to 18%, 18% to 20%, 20% to 25%,25% to 30%, 30% to 35%, 35% to 40%,40% to 45% 45% to 50%, 50% to 55%, 55% to 60%, 60% to 65%, 65% to 70% to 80%, 80% to 90%, or 90% to 100% more kynurenine than unmodified bacteria of the same bacterial subtype under the same conditions.

[0821] In yet another embodiment, the genetically engineered bacteria produce at least about 1.0-1.2-fold, 1.2-1.4-fold, 1.4-1.6-fold, 1.6-1.8-fold, 1.8-2-fold, or two-fold more STING agonist, e.g., cyclic-di-AMP, than unmodified bacteria of the same bacterial subtype under the same conditions. In yet another embodiment, the genetically engineered bacteria produce about three-fold, four-fold, five-fold, six-fold, seven-fold, eight-fold, nine-fold, ten-fold, fifteen-fold, twenty-fold, thirty-fold, forty-fold, or fifty-fold, hundred-fold, five hundred-fold, or one-thousand-fold more STING agonist, e.g., cyclic-di-AMP, than unmodified bacteria of the same bacterial subtype under the same conditions.

[0822] In yet another embodiment, the genetically engineered bacteria consume 1.0-1.2-fold, 1.2-1.4-fold, 1.4-1.6-fold, 1.6-1.8-fold, 1.8-2-fold, or two-fold more kynurenine than unmodified bacteria of the same bacterial subtype under the same conditions. In yet another embodiment, the genetically engineered bacteria consume about three-fold, four-fold, five-fold, six-fold, seven-fold, eight-fold, nine-fold, ten-fold, fifteen-fold, twenty-fold, thirty-fold, forty-fold, or fifty-fold, hundred-fold, five hundred-fold, or one-thousand-fold more kynurenine than unmodified bacteria of the same bacterial subtype under the same conditions.

[0823] In any of these STING agonist production and kynurenine consumption embodiments, the genetically engineered bacteria consume 0% to 2% to 4%, 4% to 6%,6% to 8%, 8% to 10%, 10% to 12%, 12% to 14%, 14% to 16%, 16% to 18%, 18% to 20%, 20% to 25%,25% to 30%, 30% to 35%, 35% to 40%,40% to 45% 45% to 50%, 50% to 55%, 55% to 60%, 60% to 65%, 65% to 70% to 80%, 80% to 90%, or 90% to 100% more ATP than unmodified bacteria of the same bacterial subtype under the same conditions. In yet another embodiment, the genetically engineered bacteria consume 1.0-1.2-fold, 1.2-1.4-fold, 1.4-1.6-fold, 1.6-1.8-fold, 1.8-2-fold, or two-fold more ATP than unmodified bacteria of the same bacterial subtype under the same conditions. In yet another embodiment, the genetically engineered bacteria consume about three-fold, four-fold, five-fold, six-fold, seven-fold, eight-fold, nine-fold, ten-fold, fifteen-fold, twenty-fold, thirty-fold, forty-fold, fifty-fold, hundred-fold, five hundred-fold, or one-thousand-fold more ATP than unmodified bacteria of the same bacterial subtype under the same conditions.

[0824] In a non-limiting example lowering of kynurenine levels in the block may be measured as an indicator for kynureninase expressing strain activity.

[0825] In any of these STING agonist production and kynurenine consumption embodiments, the genetically engineered bacteria produce at least about 0% to 2% to 4%, 4% to 6%,6% to 8%, 8% to 10%, 10% to 12%, 12% to 14%, 14% to 16%, 16% to 18%, 18% to 20%, 20% to 25%,25% to 30%, 30% to 35%, 35% to 40%,40% to 45% 45% to 50%, 50% to 55%, 55% to 60%, 60% to 65%, 65% to 70% to 80%, 80% to 90%, or 90% to 100% more tryptophan than unmodified bacteria of the same bacterial subtype under the same conditions. In yet another embodiment, the genetically engineered bacteria produce at least about 1.0-1.2-fold, 1.2-1.4-fold, 1.4-1.6-fold, 1.6-1.8-fold, 1.8-2-fold, or two-fold more tryptophan than unmodified bacteria of the same bacterial subtype under the same conditions. In yet another embodiment, the genetically engineered bacteria produce about three-fold, four-fold, five-fold, six-fold, seven-fold, eight-fold, nine-fold, ten-fold, fifteen-fold, twenty-fold, thirty-fold, forty-fold, fifty-fold, hundred-fold, five hundred-fold, or one-thousand-fold more tryptophan than unmodified bacteria of the same bacterial subtype under the same conditions.

[0826] In any of these embodiments, the genetically engineered bacteria increase the kynurenine consumption rate by 0% to 2% to 4%, 4% to 6%,6% to 8%, 8% to 10%, 10% to 12%, 12% to 14%, 14% to 16%, 16% to 18%, 18% to 20%, 20% to 25%,25% to 30%, 30% to 35%, 35% to 40%,40% to 45% 45% to 50%, 50% to 55%, 55% to 60%, 60% to 65%, 65% to 70% to 80%, 80% to 90%, or 90% to 100% relative to unmodified bacteria of the same bacterial subtype under the same conditions. In yet another embodiment, the genetically engineered bacteria increase the kynurenine consumption rate by 1.0-1.2-fold, 1.2-1.4-fold, 1.4-1.6-fold, 1.6-1.8-fold, 1.8-2-fold, or two-fold more relative to unmodified bacteria of the same bacterial subtype under the same conditions. In yet another embodiment, the genetically engineered bacteria increase the kynurenine consumption rate by about three-fold, four-fold, five-fold, six-fold, seven-fold, eight-fold, nine-fold, ten-fold, fifteen-fold, twenty-fold, thirty-fold, forty-fold, or fifty-fold, hundred-fold, five hundred-fold, or one-thousand-fold relative to unmodified bacteria of the same bacterial subtype under the same conditions.

[0827] In one embodiment, the genetically engineered bacteria increase the kynurenine consumption by about 80% to 100% relative to unmodified bacteria of the same bacterial subtype under the same conditions, after 4 hours. In one embodiment, the genetically engineered bacteria increase the kynurenine consumption by about 90% to 100% relative to unmodified bacteria of the same bacterial subtype under the same conditions after 4 hours. In one specific embodiment, the genetically engineered bacteria increase the kynurenine consumption by about 95% to 100% relative to unmodified bacteria of the same bacterial subtype under the same conditions, after 4 hours. In one specific embodiment, the genetically engineered bacteria increase the kynurenine consumption by about 99% to 100% relative to unmodified bacteria of the same bacterial subtype under the same conditions, after 4 hours. In yet another embodiment, the genetically engineered bacteria increase the kynurenine consumption by about 10-50 fold after 4 hours. In yet another embodiment, the genetically engineered bacteria increase the kynurenine consumption by about 50-100 fold after 4 hours. In yet another embodiment, the genetically engineered bacteria increase the kynurenine consumption by about 100-500 fold after 4 hours. In yet another embodiment, the genetically engineered bacteria increase the kynurenine consumption by about 500-1000 fold after 4 hours. In yet another embodiment, the genetically engineered bacteria increase the kynurenine consumption by about 1000-5000 fold after 4 hours. In yet another embodiment, the genetically engineered bacteria increase the kynurenine consumption by about 5000-10000 fold after 4 hours. In yet another embodiment, the genetically engineered bacteria increase the kynurenine consumption by about 10000-1000 fold after 4 hours.

[0828] In any of these embodiments, the genetically engineered bacteria increase STING agonist production rate by 0% to 2% to 4%, 4% to 6%,6% to 8%, 8% to 10%, 10% to 12%, 12% to 14%, 14% to 16%, 16% to 18%, 18% to 20%, 20% to 25%,25% to 30%, 30% to 35%, 35% to 40%,40% to 45% 45% to 50%, 50% to 55%, 55% to 60%, 60% to 65%, 65% to 70% to 80%, 80% to 90%, or 90% to 100% relative to unmodified bacteria of the same bacterial subtype under the same conditions. In yet another embodiment, the genetically engineered bacteria increase the STING agonist production rate by 1.0-1.2-fold, 1.2-1.4-fold, 1.4-1.6-fold, 1.6-1.8-fold, 1.8-2-fold, or two-fold more relative to unmodified bacteria of the same bacterial subtype under the same conditions. In yet another embodiment, the genetically engineered bacteria increase STING agonist production rate by about three-fold, four-fold, five-fold, six-fold, seven-fold, eight-fold, nine-fold, ten-fold, fifteen-fold, twenty-fold, thirty-fold, forty-fold, or fifty-fold, hundred-fold, five hundred-fold, or one-thousand-fold relative to unmodified bacteria of the same bacterial subtype under the same conditions.

[0829] In one embodiment, the genetically engineered bacteria increase STING agonist production by about 80% to 100% relative to unmodified bacteria of the same bacterial subtype under the same conditions, after 4 hours. In one embodiment, the genetically engineered bacteria increase STING agonist production by about 90% to 100% relative to unmodified bacteria of the same bacterial subtype under the same conditions after 4 hours. In one specific embodiment, the genetically engineered bacteria increase STING agonist production by about 95% to 100% relative to unmodified bacteria of the same bacterial subtype under the same conditions, after 4 hours. In one specific embodiment, the genetically engineered bacteria increase the STING agonist production by about 99% to 100% relative to unmodified bacteria of the same bacterial subtype under the same conditions, after 4 hours. In yet another embodiment, the genetically engineered bacteria increase the STING agonist production by about 10-50 fold after 4 hours. In yet another embodiment, the genetically engineered bacteria increase STING agonist production by about 50-100 fold after 4 hours. In yet another embodiment, the genetically engineered bacteria increase STING agonist production by about 100-500 fold after 4 hours. In yet another embodiment, the genetically engineered bacteria increase STING agonist production by about 500-1000 fold after 4 hours. In yet another embodiment, the genetically engineered bacteria increase the STING agonist production by about 1000-5000 fold after 4 hours. In yet another embodiment, the genetically engineered bacteria increase the STING agonist production by about 5000-10000 fold after 4 hours. In yet another embodiment, the genetically engineered bacteria increase STING agonist production by about 10000-1000 fold after 4 hours.

[0830] In any of these STING agonist production and kynurenine consumption embodiments, the genetically engineered bacteria are capable of reducing cell proliferation by at least about 10% to 20%, 20% to 25%, 25% to 30%, 30% to 40%, 40% to 50%, 50% to 60%, 60% to 70%, 70% to 75%, 75% to 80%, 80% to 85%, 85% to 90%, 90% to 95%, 95% to 99%, or more as compared to an unmodified bacteria of the same subtype under the same conditions. In any of these STING agonist production and kynurenine consumption embodiments, the genetically engineered bacteria are capable of reducing tumor growth by at least about 10% to 20%, 20% to 25%, 25% to 30%, 30% to 40%, 40% to 50%, 50% to 60%, 60% to 70%, 70% to 75%, 75% to 80%, 80% to 85%, 85% to 90%, 90% to 95%, 95% to 99%, or more as compared to an unmodified bacteria of the same subtype under the same conditions. In any of these STING agonist production and kynurenine consumption embodiments, the genetically engineered bacteria are capable of reducing tumor size by at least about 10% to 20%, 20% to 25%, 25% to 30%, 30% to 40%, 40% to 50%, 50% to 60%, 60% to 70%, 70% to 75%, 75% to 80%, 80% to 85%, 85% to 90%, 90% to 95%, 95% to 99%, or more as compared to an unmodified bacteria of the same subtype under the same conditions. In any of these STING agonist production and kynurenine consumption embodiments, the genetically engineered bacteria are capable of reducing tumor volume by at least about 10% to 20%, 20% to 25%, 25% to 30%, 30% to 40%, 40% to 50%, 50% to 60%, 60% to 70%, 70% to 75%, 75% to 80%, 80% to 85%, 85% to 90%, 90% to 95%, 95% to 99%, or more as compared to an unmodified bacteria of the same subtype under the same conditions. In any of these STING agonist production and kynurenine consumption embodiments, the genetically engineered bacteria are capable of reducing tumor weight by at least about 10% to 20%, 20% to 25%, 25% to 30%, 30% to 40%, 40% to 50%, 50% to 60%, 60% to 70%, 70% to 75%, 75% to 80%, 80% to 85%, 85% to 90%, 90% to 95%, 95% to 99%, or more as compared to an unmodified bacteria of the same subtype under the same conditions.

[0831] In some STING agonist production and kynurenine consumption embodiments, the genetically engineered microorganisms are capable of expressing any one or more of the described circuits for the degradation of adenosine and kynurenine in low-oxygen conditions, and/or in the presence of cancer and/or the tumor microenvironment, or tissue specific molecules or metabolites, and/or in the presence of molecules or metabolites associated with inflammation or immune suppression, and/or in the presence of metabolites that may be present in the gut, and/or in the presence of metabolites that may or may not be present in vivo, and may be present in vitro during strain culture, expansion, production and/or manufacture, such as arabinose, cumate, and salicylate and others described herein. In some embodiments such an inducer may be administered in vivo to induce effector gene expression. In some embodiments, the gene sequences(s) encoding circuitry for the STING agonist production and the degradation of kynurenine are controlled by a promoter inducible by such conditions and/or inducers. In some embodiments, the gene sequences(s) are controlled by a constitutive promoter, as described herein. In some embodiments, the gene sequences(s) are controlled by a constitutive promoter, and are expressed in in vivo conditions and/or in vitro conditions, e.g., during expansion, production and/or manufacture, as described herein.

[0832] In any of these STING agonist production and kynurenine consumption embodiments, any one or more of the described STING agonist production circuits and kynurenine consumption circuits are present on one or more plasmids (e.g., high copy or low copy) or are integrated into one or more sites in the microorganismal chromosome. Also, in some embodiments, the genetically engineered microorganisms are further capable of expressing any one or more of the described circuits and further comprise one or more of the following: (1) one or more auxotrophies, such as any auxotrophies known in the art and provided herein, e.g., thyA and/or dapA auxotrophy, (2) one or more kill switch circuits, such as any of the kill-switches described herein or otherwise known in the art, (3) one or more antibiotic resistance circuits, (4) one or more transporters for importing biological molecules or substrates, such any of the transporters described herein or otherwise known in the art, (5) one or more secretion circuits, such as any of the secretion circuits described herein and otherwise known in the art, (6) one or more surface display circuits, such as any of the surface display circuits described herein and otherwise known in the art and (7) one or more circuits for the production or degradation of one or more metabolites (e.g., kynurenine, tryptophan, adenosine, arginine) described herein (8) combinations of one or more of such additional circuits.

[0833] In any of these embodiments, the one or more bacteria genetically engineered to produce STING agonists and consume kynurenine may be administered alone or in combination with one or more immune checkpoint inhibitors described herein, including but not limited to anti-CTLA4, anti-PD1, or anti-PD-L1 antibodies. In any of these embodiments, the one or more bacteria genetically engineered to produce STING agonists and consume kynurenine may be genetically engineered to produce and secrete or display on their surface one or more immune checkpoint inhibitors described herein, including but not limited to anti-CTLA4, anti-PD1, or anti-PD-L1 antibodies.

[0834] In any of these embodiments, the one or more bacteria genetically engineered to produce STING agonists and consume kynurenine may be administered alone or in combination with one or more immune stimulatory agonists described herein, e.g., agonistic antibodies, including but not limited to anti-OX40, anti-41BB, or anti-GITR antibodies. In any of these embodiments, the one or more bacteria genetically engineered to produce STING agonists and consume kynurenine may be genetically engineered to produce and secrete or display on their surface one or more immune stimulatory agonists described herein, e.g., agonistic antibodies, including but not limited to anti-OX40, anti-41BB, or anti-GITR antibodies.

[0835] In certain embodiments, one or more genetically engineered bacteria expressing any one or more of the described circuits for the production of one or more STING agonists and one or more kynureninase(s), e.g., from Pseudomonas fluorescens, may be genetically engineered to produce and secrete or display on their surface one or more immune checkpoint inhibitors described herein, including but not limited to anti-CTLA4, anti-PD1, or anti-PD-L1 antibodies. In one embodiment, one or more genetically engineered bacteria comprise gene sequence(s) encoding DacA, e.g., from Listeria monocytogenes, wherein DacA is operably linked to a promoter inducible under low oxygen conditions, e.g., a FNR promoter. The bacteria comprising gene sequences encoding dacA comprise a mutation or deletion in dapA. The one or more genetically engineered bacteria further comprise gene sequences encoding kynureninase from Pseudomonas fluorescens and the bacterium comprising gene sequences encoding kynureninase further comprises a mutation or deletion in TrpE. In certain embodiments, dacA and kynureninase sequences are integrated into the bacterial chromosome. In one specific embodiment, the one or more genetically engineered bacteria may further comprise mutation(s) or deletion(s) in ThyA. In one specific embodiment, the checkpoint inhibitor is PD-1. In one specific embodiment, the checkpoint inhibitor is PD-L1. In one specific embodiment, the checkpoint inhibitor is CTLA-4.

[0836] In one embodiment, dacA circuitry (e.g., from Listeria monocytogenes, e.g., under control of a low oxygen promoter and chromosomally integrated), kynureninase circuitry (e.g., from Pseudomonas fluorescens, e.g., under the control of a constitutive promoter and chromosomally integrated) and auxotrophic mutations (mutations or deletions in TrpE, dapA, and ThyA), and checkpoint inhibitor secretion or display circuitry (e.g., under the control of a constitutive promoter or inducible promoter and chromosomally integrated) are combined in one bacterium. In an alternate embodiment, a bacterial composition comprises a first bacterium comprising gene sequences encoding dacA (e.g., from Listeria monocytogenes, e.g., under control of a low oxygen promoter and chromosomally integrated), further comprising a mutation or deletion in DapA, and with an optional mutations or deletions in ThyA and a second bacterium comprising gene sequences encoding kynureninase circuitry (e.g., from Pseudomonas fluorescens, e.g., under the control of a constitutive promoter and chromosomally integrated), a mutation or deletion in TrpE, and optionally a mutation or deletion in ThyA. The composition further comprises a third bacterium engineered to secrete or display the checkpoint inhibitor. Alternatively the first or second bacterium are engineered to secrete or display the checkpoint inhibitor.

[0837] In any of these combination embodiments in which the genetically engineered bacteria encode circuitry for the production of one or more STING agonists, the bacteria may further comprise an auxotrophic modification, e.g., a mutation or deletion in DapA, ThyA, or both. In any of these embodiments in which the genetically engineered bacteria encode circuitry for the production of one or more STING agonists, the bacteria may further comprise a phage modification, e.g., a mutation or deletion, in an endogenous prophage as described herein

### STING Agonists and Adenosine Consumption

[0838] In one embodiment, the genetically engineered bacteria comprise one or more genes encoding enzymes for the production of STING agonist(s) in combination with one or more genes encoding enzymes for the consumption of adenosine. In one embodiment, the STING agonist produced is c-di-AMP. In one embodiment, the genetically engineered bacteria comprises gene sequences encoding a diadenylate cyclase in combination with gene sequences encoding an adenosine degradation pathway. In one embodiment, the diadenylate cyclase is from Listeria monocytogenes. In one embodiment, the gene sequences encoding the adenosine degradation pathway enzymes comprise one or more genes selected from xdhA, xdhB, xdhC, add, xapA, deoD, and nupC. In one embodiment, the gene sequences encoding the adenosine degradation pathway comprise xdhA, xdhB, xdhC, add, xapA, deoD, and nupC. In one embodiment, the adenosine pathway enzymes are from E. coli. In one specific embodiment, the diadenylate cyclase is from Listeria monocytogenes and the gene sequences encoding the adenosine degradation pathway comprise xdhA, xdhB, xdhC, add, xapA, deoD, and nupC, e.g., from E. coli. In on specific embodiment, the adenosine pathway enzymes are integrated into the chromosome and are under the control of a low-oxygen promoter, e.g., FNR.

[0839] In one embodiment, the STING agonist produced is cyclic-di-GAMP. In one embodiment, the genetically engineered bacteria comprises gene sequences encoding a c-di-GAMP synthase in combination with gene sequences encoding a adenosine degradation pathway. In one embodiment, the c-di-GAMP synthases is from Vibrio cholerae. In one embodiment, the c-di-GAMP synthases is human cGAS. In one embodiment, the gene sequences encoding the adenosine degradation pathway enzymes comprise one or more genes selected from xdhA, xdhB, xdhC, add, xapA, deoD, and nupC. In one embodiment, the gene sequences encoding the adenosine degradation pathway comprise xdhA, xdhB, xdhC, add, xapA, deoD, and nupC. In one embodiment, the adenosine pathway enzymes are from E. coli. In one specific embodiment, the c-di-GAMP synthase is from Vibrio cholerae and the gene sequences encoding the adenosine degradation pathway comprise xdhA, xdhB, xdhC, add, xapA, deoD, and nupC, e.g., from E. coli. In one specific embodiment, the c-di-GAMP synthase is from human cGAS and the gene sequences encoding the adenosine degradation pathway comprise xdhA, xdhB, xdhC, add, xapA, deoD, and nupC, e.g., from E. coli. In one specific embodiment, the genes encoding the adenosine degradation pathway are chromosomally integrated and under control of a low-oxygen promoter, e.g., FNR.

[0840] In alternate embodiments, the disclosure provides a composition comprising a combination (e.g., two or more) of different genetically engineered bacteria, each bacteria encoding a different immune modulator. Accordingly, in one embodiment, the composition comprises genetically engineered bacteria comprising one or more genes encoding enzymes for the production of STING agonist(s) in combination with comprises genetically engineered bacteria comprising one or more genes encoding enzymes for the consumption of adenosine. In one embodiment, the STING agonist produced is c-di-AMP. In one embodiment, the composition comprises genetically engineered bacteria comprising gene sequences encoding a diadenylate cyclase in combination with genetically engineered bacteria comprising gene sequences encoding an adenosine degradation pathway. In one embodiment, the diadenylate cyclase is from Listeria monocytogenes. In one embodiment, the gene sequences encoding the adenosine degradation pathway enzymes comprise one or more genes selected from xdhA, xdhB, xdhC, add, xapA, deoD, and nupC. In one embodiment, the gene sequences encoding the adenosine degradation pathway comprise xdhA, xdhB, xdhC, add, xapA, deoD, and nupC. In one embodiment, the adenosine pathway enzymes are from E. coli. In one specific embodiment, the diadenylate cyclase is from Listeria monocytogenes and the gene sequences encoding the adenosine degradation pathway comprise xdhA, xdhB, xdhC, add, xapA, deoD, and nupC, e.g., from E. coli. In on specific embodiment, the adenosine pathway enzymes are integrated into the chromosome and are under the control of a low-oxygen promoter, e.g., FNR.

[0841] In one embodiment, the STING agonist produced is cyclic-di-GAMP. In one embodiment, the composition comprises genetically engineered bacteria comprising gene sequences encoding a c-di-GAMP synthase in combination with genetically engineered bacteria comprising gene sequences encoding an adenosine degradation pathway. In one embodiment, the c-di-GAMP synthases is from Vibrio cholerae. In one embodiment, the c-di-GAMP synthases is human cGAS.

[0842] In one embodiment, the gene sequences encoding the adenosine degradation pathway enzymes comprise one or more genes selected from xdhA, xdhB, xdhC, add, xapA, deoD, and nupC. In one embodiment, the gene sequences encoding the adenosine degradation pathway comprise xdhA, xdhB, xdhC, add, xapA, deoD, and nupC. In one embodiment, the adenosine pathway enzymes are from E. coli. In one specific embodiment, the c-di-GAMP synthase is from Vibrio cholerae and the gene sequences encoding the adenosine degradation pathway comprise xdhA, xdhB, xdhC, add, xapA, deoD, and nupC, e.g., from E. coli. In one specific embodiment, the c-di-GAMP synthase is human cGAS and the gene sequences encoding the adenosine degradation pathway comprise xdhA, xdhB, xdhC, add, xapA, deoD, and nupC, e.g., from E. coli. In one specific embodiment, the genes encoding the adenosine degradation pathway are chromosomally integrated and under control of a low-oxygen promoter, e.g., FNR.

[0843] In any of these STING agonist production and adenosine consumption embodiments, the genetically engineered bacteria produce at least about 0% to 2%, 2% to 4%, 4% to 6%,6% to 8%, 8% to 10%, 10% to 12%, 12% to 14%, 14% to 16%, 16% to 18%, 18% to 20%, 20% to 25%,25% to 30%, 30% to 35%, 35% to 40%,40% to 45% 45% to 50%, 50% to 55%, 55% to 60%, 60% to 65%, 65% to 70% to 80%, 80% to 90%, or 90% to 100% more STING agonist, e.g., cyclic-di-AMP, than unmodified bacteria of the same bacterial subtype under the same conditions.

[0844] In any of these STING agonist production and adenosine consumption embodiments, the genetically engineered bacteria consume 0% to 2%, 2% to 4%, 4% to 6%,6% to 8%, 8% to 10%, 10% to 12%, 12% to 14%, 14% to 16%, 16% to 18%, 18% to 20%, 20% to 25%,25% to 30%, 30% to 35%, 35% to 40%,40% to 45% 45% to 50%, 50% to 55%, 55% to 60%, 60% to 65%, 65% to 70% to 80%, 80% to 90%, or 90% to 100% more adenosine than unmodified bacteria of the same bacterial subtype under the same conditions.

[0845] In yet another embodiment, the genetically engineered bacteria produce at least about 1.0-1.2-fold, 1.2-1.4-fold, 1.4-1.6-fold, 1.6-1.8-fold, 1.8-2-fold, or two-fold more STING agonist, e.g., cyclic-di-AMP, than unmodified bacteria of the same bacterial subtype under the same conditions. In yet another embodiment, the genetically engineered bacteria produce about three-fold, four-fold, five-fold, six-fold, seven-fold, eight-fold, nine-fold, ten-fold, fifteen-fold, twenty-fold, thirty-fold, forty-fold, or fifty-fold, hundred-fold, five hundred-fold, or one-thousand-fold more STING agonist, e.g., cyclic-di-AMP, than unmodified bacteria of the same bacterial subtype under the same conditions.

[0846] In yet another embodiment, the genetically engineered bacteria consume 1.0-1.2-fold, 1.2-1.4-fold, 1.4-1.6-fold, 1.6-1.8-fold, 1.8-2-fold, or two-fold more adenosine than unmodified bacteria of the same bacterial subtype under the same conditions. In yet another embodiment, the genetically engineered bacteria consume about three-fold, four-fold, five-fold, six-fold, seven-fold, eight-fold, nine-fold, ten-fold, fifteen-fold, twenty-fold, thirty-fold, forty-fold, or fifty-fold, hundred-fold, five hundred-fold, or one-thousand-fold more adenosine than unmodified bacteria of the same bacterial subtype under the same conditions.

[0847] In any of these STING agonist production and adenosine consumption embodiments, the genetically engineered bacteria consume 0% to 2%, 2% to 4%, 4% to 6%,6% to 8%, 8% to 10%, 10% to 12%, 12% to 14%, 14% to 16%, 16% to 18%, 18% to 20%, 20% to 25%,25% to 30%, 30% to 35%, 35% to 40%,40% to 45% 45% to 50%, 50% to 55%, 55% to 60%, 60% to 65%, 65% to 70% to 80%, 80% to 90%, or 90% to 100% more ATP than unmodified bacteria of the same bacterial subtype under the same conditions. In yet another embodiment, the genetically engineered bacteria consume 1.0-1.2-fold, 1.2-1.4-fold, 1.4-1.6-fold, 1.6-1.8-fold, 1.8-2-fold, or two-fold more adenosine than unmodified bacteria of the same bacterial subtype under the same conditions. In yet another embodiment, the genetically engineered bacteria consume about three-fold, four-fold, five-fold, six-fold, seven-fold, eight-fold, nine-fold, ten-fold, fifteen-fold, twenty-fold, thirty-fold, forty-fold, fifty-fold, hundred-fold, five hundred-fold, or one-thousand-fold more ATP than unmodified bacteria of the same bacterial subtype under the same conditions.

[0848] In any of these STING agonist production and adenosine consumption embodiments, the genetically engineered bacteria produce at least about 0% to 2%, 2% to 4%, 4% to 6%,6% to 8%, 8% to 10%, 10% to 12%, 12% to 14%, 14% to 16%, 16% to 18%, 18% to 20%, 20% to 25%,25% to 30%, 30% to 35%, 35% to 40%,40% to 45% 45% to 50%, 50% to 55%, 55% to 60%, 60% to 65%, 65% to 70% to 80%, 80% to 90%, or 90% to 100% more urate than unmodified bacteria of the same bacterial subtype under the same conditions. In yet another embodiment, the genetically engineered bacteria produce at least about 1.0-1.2-fold, 1.2-1.4-fold, 1.4-1.6-fold, 1.6-1.8-fold, 1.8-2-fold, or two-fold more urate than unmodified bacteria of the same bacterial subtype under the same conditions. In yet another embodiment, the genetically engineered bacteria produce about three-fold, four-fold, five-fold, six-fold, seven-fold, eight-fold, nine-fold, ten-fold, fifteen-fold, twenty-fold, thirty-fold, forty-fold, fifty-fold, hundred-fold, five hundred-fold, or one-thousand-fold more urate than unmodified bacteria of the same bacterial subtype under the same conditions.

[0849] In any of these STING agonist production and adenosine consumption embodiments, the genetically engineered bacteria are capable of reducing cell proliferation by at least about 10% to 20%, 20% to 25%, 25% to 30%, 30% to 40%, 40% to 50%, 50% to 60%, 60% to 70%, 70% to 75%, 75% to 80%, 80% to 85%, 85% to 90%, 90% to 95%, 95% to 99%, or more as compared to an unmodified bacteria of the same subtype under the same conditions. In any of these STING agonist production and adenosine consumption embodiments, the genetically engineered bacteria are capable of reducing tumor growth by at least about 10% to 20%, 20% to 25%, 25% to 30%, 30% to 40%, 40% to 50%, 50% to 60%, 60% to 70%, 70% to 75%, 75% to 80%, 80% to 85%, 85% to 90%, 90% to 95%, 95% to 99%, or more as compared to an unmodified bacteria of the same subtype under the same conditions. In any of these STING agonist production and adenosine consumption embodiments, the genetically engineered bacteria are capable of reducing tumor size by at least about 10% to 20%, 20% to 25%, 25% to 30%, 30% to 40%, 40% to 50%, 50% to 60%, 60% to 70%, 70% to 75%, 75% to 80%, 80% to 85%, 85% to 90%, 90% to 95%, 95% to 99%, or more as compared to an unmodified bacteria of the same subtype under the same conditions. In any of these STING agonist production and adenosine consumption embodiments, the genetically engineered bacteria are capable of reducing tumor volume by at least about 10% to 20%, 20% to 25%, 25% to 30%, 30% to 40%, 40% to 50%, 50% to 60%, 60% to 70%, 70% to 75%, 75% to 80%, 80% to 85%, 85% to 90%, 90% to 95%, 95% to 99%, or more as compared to an unmodified bacteria of the same subtype under the same conditions. In any of these STING agonist production and adenosine consumption embodiments, the genetically engineered bacteria are capable of reducing tumor weight by at least about 10% to 20%, 20% to 25%, 25% to 30%, 30% to 40%, 40% to 50%, 50% to 60%, 60% to 70%, 70% to 75%, 75% to 80%, 80% to 85%, 85% to 90%, 90% to 95%, 95% to 99%, or more as compared to an unmodified bacteria of the same subtype under the same conditions.

[0850] In some STING agonist production and adenosine consumption embodiments, the genetically engineered microorganisms are capable of expressing any one or more of the described circuits for STING agonist production and the degradation of adenosine in low-oxygen conditions, and/or in the presence of cancer and/or the tumor microenvironment, or tissue specific molecules or metabolites, and/or in the presence of molecules or metabolites associated with inflammation or immune suppression, and/or in the presence of metabolites that may be present in the gut, and/or in the presence of metabolites that may or may not be present in vivo, and may be present in vitro during strain culture, expansion, production and/or manufacture, such as arabinose, cumate, and salicylate and others described herein. In some embodiments such an inducer may be administered in vivo to induce effector gene expression. In some embodiments, the gene sequences(s) encoding circuitry for the STING agonist production and the degradation of adenosine are controlled by a promoter inducible by such conditions and/or inducers. In some embodiments, the gene sequences(s) are controlled by a constitutive promoter, as described herein. In some embodiments, the gene sequences(s) are controlled by a constitutive promoter, and are expressed in in vivo conditions and/or in vitro conditions, e.g., during expansion, production and/or manufacture, as described herein.

[0851] In any of these STING agonist production and adenosine consumption embodiments, any one or more of the described STING agonist production circuits and adenosine consumption circuits are present on one or more plasmids (e.g., high copy or low copy) or are integrated into one or more sites in the microorganismal chromosome. Also, in some embodiments, the genetically engineered microorganisms are further capable of expressing any one or more of the described circuits and further comprise one or more of the following: (1) one or more auxotrophies, such as any auxotrophies known in the art and provided herein, e.g., thyA and/or dapA auxotrophy, (2) one or more kill switch circuits, such as any of the kill-switches described herein or otherwise known in the art, (3) one or more antibiotic resistance circuits, (4) one or more transporters for importing biological molecules or substrates, such any of the transporters described herein or otherwise known in the art, (5) one or more secretion circuits, such as any of the secretion circuits described herein and otherwise known in the art, (6) one or more surface display circuits, such as any of the surface display circuits described herein and otherwise known in the art and (7) one or more circuits for the production or degradation of one or more metabolites (e.g., adenosine, tryptophan, adenosine, arginine) described herein (8) combinations of one or more of such additional circuits.

[0852] In any of these embodiments, the one or more bacteria genetically engineered to produce STING agonists and consume adenosine may be administered alone or in combination with one or more immune checkpoint inhibitors described herein, including but not limited to anti-CTLA4, anti-PD1, or anti-PD-L1 antibodies. In any of these embodiments, the one or more bacteria genetically engineered to produce STING agonists and consume adenosine may be genetically engineered to produce and secrete or display on their surface one or more immune checkpoint inhibitors described herein, including but not limited to anti-CTLA4, anti-PD1, or anti-PD-L1 antibodies.

[0853] In any of these embodiments, the one or more bacteria genetically engineered to produce STING agonists and consume adenosine may be administered alone or in combination with one or more immune stimulatory agonists described herein, e.g., agonistic antibodies, including but not limited to anti-OX40, anti-41BB, or anti-GITR antibodies. In any of these embodiments, the one or more bacteria genetically engineered to produce STING agonists and consume adenosine may be genetically engineered to produce and secrete or display on their surface one or more immune stimulatory agonists described herein, e.g., agonistic antibodies, including but not limited to anti-OX40, anti-41BB, or anti-GITR antibodies.

### STING Agonists and Arginine Production/Ammonia Consumption

[0854] In one embodiment, the genetically engineered bacteria comprise one or more genes encoding enzymes for the production of STING agonist(s) in combination with one or more genes encoding enzymes for the production of arginine and/or consumption of ammonia. In one embodiment, the STING agonist produced is c-di-AMP. In one embodiment, the genetically engineered bacteria comprises gene sequences encoding a diadenylate cyclase in combination with gene sequences encoding an arginine production and/or ammonia consumption pathway. In one embodiment, the diadenylate cyclase is from Listeria monocytogenes. In one embodiment, the gene sequences encoding the arginine production and/or ammonia consumption circuit comprise feedback resistant ArgA (ArgAfbr) and a deletion in the endogenous arginine operon repressor ArgR. In one embodiment, the ArgAfbr is from E. coli. In one specific embodiment, ArgAfbr is integrated into the chromosome and is under the control of a low-oxygen promoter, e.g., FNR.

[0855] In alternate embodiments, the disclosure provides a composition comprising a combination (e.g., two or more) of different genetically engineered bacteria, each bacteria encoding a different immune modulator. Accordingly, in one embodiment, the composition comprises genetically engineered bacteria comprising one or more genes encoding enzymes for the production of STING agonist(s) in combination with genetically engineered bacteria comprising one or more genes encoding enzymes for the production of arginine. In one embodiment, the STING agonist produced is c-di-AMP. In one embodiment, the composition comprises genetically engineered bacteria comprising gene sequences encoding a diadenylate cyclase in combination with genetically engineered bacteria comprising gene sequences encoding an arginine production pathway. In one embodiment, the diadenylate cyclase is from Listeria monocytogenes. In one embodiment, the gene sequences encoding the arginine production circuit comprise feedback resistant ArgA (ArgAfbr) and a deletion in the endogenous arginine operon repressor ArgR. In one embodiment, the ArgAfbr is from E. coli. In one specific embodiment, ArgAfbr is integrated into the chromosome and is under the control of a low-oxygen promoter, e.g., FNR.

[0856] In any of these STING agonist production and arginine production and/or ammonia consumption embodiments, the genetically engineered bacteria produce at least about 0% to 2% to 4%, 4% to 6%,6% to 8%, 8% to 10%, 10% to 12%, 12% to 14%, 14% to 16%, 16% to 18%, 18% to 20%, 20% to 25%,25% to 30%, 30% to 35%, 35% to 40%,40% to 45% 45% to 50%, 50% to 55%, 55% to 60%, 60% to 65%, 65% to 70% to 80%, 80% to 90%, or 90% to 100% more STING agonist, e.g., cyclic-di-AMP, than unmodified bacteria of the same bacterial subtype under the same conditions.

[0857] In any of these STING agonist production and arginine production and/or ammonia consumption embodiments, the genetically engineered bacteria produce at least about 0% to 2%, 2% to 4%, 4% to 6%,6% to 8%, 8% to 10%, 10% to 12%, 12% to 14%, 14% to 16%, 16% to 18%, 18% to 20%, 20% to 25%,25% to 30%, 30% to 35%, 35% to 40%,40% to 45% 45% to 50%, 50% to 55%, 55% to 60%, 60% to 65%, 65% to 70% to 80%, 80% to 90%, or 90% to 100% more arginine than unmodified bacteria of the same bacterial subtype under the same conditions.

[0858] In yet another embodiment, the genetically engineered bacteria produce at least about 1.0-1.2-fold, 1.2-1.4-fold, 1.4-1.6-fold, 1.6-1.8-fold, 1.8-2-fold, or two-fold more STING agonist, e.g., cyclic-di-AMP, than unmodified bacteria of the same bacterial subtype under the same conditions. In yet another embodiment, the genetically engineered bacteria produce about three-fold, four-fold, five-fold, six-fold, seven-fold, eight-fold, nine-fold, ten-fold, fifteen-fold, twenty-fold, thirty-fold, forty-fold, or fifty-fold, hundred-fold, five hundred-fold, or one-thousand-fold more STING agonist, e.g., cyclic-di-AMP, than unmodified bacteria of the same bacterial subtype under the same conditions.

[0859] In yet another embodiment, the genetically engineered bacteria produce at least about 1.0-1.2-fold, 1.2-1.4-fold, 1.4-1.6-fold, 1.6-1.8-fold, 1.8-2-fold, or two-fold more arginine than unmodified bacteria of the same bacterial subtype under the same conditions. In yet another embodiment, the genetically engineered bacteria produce about three-fold, four-fold, five-fold, six-fold, seven-fold, eight-fold, nine-fold, ten-fold, fifteen-fold, twenty-fold, thirty-fold, forty-fold, or fifty-fold, hundred-fold, five hundred-fold, or one-thousand-fold more arginine than unmodified bacteria of the same bacterial subtype under the same conditions.

[0860] In any of these STING agonist production and arginine production and/or ammonia consumption embodiments, the genetically engineered bacteria consume 0% to 2%, 2% to 4%, 4% to 6%,6% to 8%, 8% to 10%, 10% to 12%, 12% to 14%, 14% to 16%, 16% to 18%, 18% to 20%, 20% to 25%,25% to 30%, 30% to 35%, 35% to 40%,40% to 45% 45% to 50%, 50% to 55%, 55% to 60%, 60% to 65%, 65% to 70% to 80%, 80% to 90%, or 90% to 100% more ATP than unmodified bacteria of the same bacterial subtype under the same conditions. In yet another embodiment, the genetically engineered bacteria consume 1.0-1.2-fold, 1.2-1.4-fold, 1.4-1.6-fold, 1.6-1.8-fold, 1.8-2-fold, or two-fold more arginine than unmodified bacteria of the same bacterial subtype under the same conditions. In yet another embodiment, the genetically engineered bacteria consume about three-fold, four-fold, five-fold, six-fold, seven-fold, eight-fold, nine-fold, ten-fold, fifteen-fold, twenty-fold, thirty-fold, forty-fold, fifty-fold, hundred-fold, five hundred-fold, or one-thousand-fold more glutamate than unmodified bacteria of the same bacterial subtype under the same conditions.

[0861] In any of these STING agonist production and arginine production and/or ammonia consumption embodiments, the genetically engineered bacteria consume 0% to 2%, 2% to 4%, 4% to 6%,6% to 8%, 8% to 10%, 10% to 12%, 12% to 14%, 14% to 16%, 16% to 18%, 18% to 20%, 20% to 25%,25% to 30%, 30% to 35%, 35% to 40%,40% to 45% 45% to 50%, 50% to 55%, 55% to 60%, 60% to 65%, 65% to 70% to 80%, 80% to 90%, or 90% to 100% more glutamate than unmodified bacteria of the same bacterial subtype under the same conditions. In yet another embodiment, the genetically engineered bacteria consume 1.0-1.2-fold, 1.2-1.4-fold, 1.4-1.6-fold, 1.6-1.8-fold, 1.8-2-fold, or two-fold more glutamate than unmodified bacteria of the same bacterial subtype under the same conditions. In yet another embodiment, the genetically engineered bacteria consume about three-fold, four-fold, five-fold, six-fold, seven-fold, eight-fold, nine-fold, ten-fold, fifteen-fold, twenty-fold, thirty-fold, forty-fold, fifty-fold, hundred-fold, five hundred-fold, or one-thousand-fold more glutamate than unmodified bacteria of the same bacterial subtype under the same conditions.

[0862] In any of these STING agonist production and arginine production and/or ammonia consumption embodiments, the genetically engineered bacteria consume 0% to 2%, 2% to 4%, 4% to 6%,6% to 8%, 8% to 10%, 10% to 12%, 12% to 14%, 14% to 16%, 16% to 18%, 18% to 20%, 20% to 25%,25% to 30%, 30% to 35%, 35% to 40%,40% to 45% 45% to 50%, 50% to 55%, 55% to 60%, 60% to 65%, 65% to 70% to 80%, 80% to 90%, or 90% to 100% more ammonia than unmodified bacteria of the same bacterial subtype under the same conditions. In yet another embodiment, the genetically engineered bacteria consume 1.0-1.2-fold, 1.2-1.4-fold, 1.4-1.6-fold, 1.6-1.8-fold, 1.8-2-fold, or two-fold more ammonia than unmodified bacteria of the same bacterial subtype under the same conditions. In yet another embodiment, the genetically engineered bacteria consume about three-fold, four-fold, five-fold, six-fold, seven-fold, eight-fold, nine-fold, ten-fold, fifteen-fold, twenty-fold, thirty-fold, forty-fold, fifty-fold, hundred-fold, five hundred-fold, or one-thousand-fold more ammonia than unmodified bacteria of the same bacterial subtype under the same conditions.

[0863] In any of these STING agonist production and arginine production and/or ammonia consumption embodiments, the genetically engineered bacteria are capable of reducing cell proliferation by at least about 10% to 20%, 20% to 25%, 25% to 30%, 30% to 40%, 40% to 50%, 50% to 60%, 60% to 70%, 70% to 75%, 75% to 80%, 80% to 85%, 85% to 90%, 90% to 95%, 95% to 99%, or more as compared to an unmodified bacteria of the same subtype under the same conditions. In any of these STING agonist production and arginine production and/or ammonia consumption embodiments, the genetically engineered bacteria are capable of reducing tumor growth by at least about 10% to 20%, 20% to 25%, 25% to 30%, 30% to 40%, 40% to 50%, 50% to 60%, 60% to 70%, 70% to 75%, 75% to 80%, 80% to 85%, 85% to 90%, 90% to 95%, 95% to 99%, or more as compared to an unmodified bacteria of the same subtype under the same conditions. In any of these STING agonist production and arginine production and/or ammonia consumption embodiments, the genetically engineered bacteria are capable of reducing tumor size by at least about 10% to 20%, 20% to 25%, 25% to 30%, 30% to 40%, 40% to 50%, 50% to 60%, 60% to 70%, 70% to 75%, 75% to 80%, 80% to 85%, 85% to 90%, 90% to 95%, 95% to 99%, or more as compared to an unmodified bacteria of the same subtype under the same conditions. In any of these STING agonist production and arginine production and/or ammonia consumption embodiments, the genetically engineered bacteria are capable of reducing tumor volume by at least about 10% to 20%, 20% to 25%, 25% to 30%, 30% to 40%, 40% to 50%, 50% to 60%, 60% to 70%, 70% to 75%, 75% to 80%, 80% to 85%, 85% to 90%, 90% to 95%, 95% to 99%, or more as compared to an unmodified bacteria of the same subtype under the same conditions. In any of these STING agonist production and arginine production and/or ammonia consumption embodiments, the genetically engineered bacteria are capable of reducing tumor weight by at least about 10% to 20%, 20% to 25%, 25% to 30%, 30% to 40%, 40% to 50%, 50% to 60%, 60% to 70%, 70% to 75%, 75% to 80%, 80% to 85%, 85% to 90%, 90% to 95%, 95% to 99%, or more as compared to an unmodified bacteria of the same subtype under the same conditions.

[0864] In some STING agonist production and arginine production/ammonia consumption embodiments, the genetically engineered microorganisms are capable of expressing any one or more of the described circuits for STING agonist production and arginine production/ammonia consumption in low-oxygen conditions, and/or in the presence of cancer and/or the tumor microenvironment, or tissue specific molecules or metabolites, and/or in the presence of molecules or metabolites associated with inflammation or immune suppression, and/or in the presence of metabolites that may be present in the gut, and/or in the presence of metabolites that may or may not be present in vivo, and may be present in vitro during strain culture, expansion, production and/or manufacture, such as arabinose, cumate, and salicylate and others described herein. In some embodiments such an inducer may be administered in vivo to induce effector gene expression. In some embodiments, the gene sequences(s) encoding circuitry for the STING agonist production and arginine production/ammonia consumption are controlled by a promoter inducible by such conditions and/or inducers. In some embodiments, the gene sequences(s) are controlled by a constitutive promoter, as described herein. In some embodiments, the gene sequences(s) are controlled by a constitutive promoter, and are expressed in in vivo conditions and/or in vitro conditions, e.g., during expansion, production and/or manufacture, as described herein.

[0865] In any of these STING agonist production and arginine production/ammonia consumption embodiments, any one or more of the described STING agonist production circuits and arginine production/ammonia consumption circuits are present on one or more plasmids (e.g., high copy or low copy) or are integrated into one or more sites in the microorganismal chromosome. Also, in some embodiments, the genetically engineered microorganisms are further capable of expressing any one or more of the described circuits and further comprise one or more of the following: (1) one or more auxotrophies, such as any auxotrophies known in the art and provided herein, e.g., thyA and/or dapA auxotrophy, (2) one or more kill switch circuits, such as any of the kill-switches described herein or otherwise known in the art, (3) one or more antibiotic resistance circuits, (4) one or more transporters for importing biological molecules or substrates, such any of the transporters described herein or otherwise known in the art, (5) one or more secretion circuits, such as any of the secretion circuits described herein and otherwise known in the art, (6) one or more surface display circuits, such as any of the surface display circuits described herein and otherwise known in the art and (7) one or more circuits for the production or degradation of one or more metabolites (e.g., arginine production/ammonia, tryptophan, arginine production/ammonia, arginine, and kynurenine) described herein (8) combinations of one or more of such additional circuits.

[0866] In any of these embodiments, the one or more bacteria genetically engineered to produce STING agonists and produce arginine and/or consume ammonia may be administered alone or in combination with one or more immune checkpoint inhibitors described herein, including but not limited to anti-CTLA4, anti-PD1, or anti-PD-L1 antibodies. In any of these embodiments, the one or more bacteria genetically engineered to produce STING agonists and produce arginine and/or consume ammonia may be genetically engineered to produce and secrete or display on their surface one or more immune checkpoint inhibitors described herein, including but not limited to anti-CTLA4, anti-PD1, or anti-PD-L1 antibodies.

[0867] In any of these embodiments, the one or more bacteria genetically engineered to produce STING agonists and produce arginine and/or consume ammonia may be administered alone or in combination with one or more immune stimulatory agonists described herein, e.g., agonistic antibodies, including but not limited to anti-OX40, anti-41BB, or anti-GITR antibodies. In any of these embodiments, the one or more bacteria genetically engineered to produce STING agonists and produce arginine and/or consume ammonia may be genetically engineered to produce and secrete or display on their surface one or more immune stimulatory agonists described herein, e.g., agonistic antibodies, including but not limited to anti-OX40, anti-41BB, or anti-GITR antibodies.

[0868] In certain embodiments, one or more genetically engineered bacteria expressing any one or more of the described circuits for the production of one or more STING agonists and one or more kynureninase(s), e.g., from Pseudomonas fluorescens, further comprise circuitry for the secretion or display of a checkpoint inhibitor, e.g., anti-PD-1, anti-PD-L1 or anti-CTLA-4. In one embodiment, one or more genetically engineered bacteria comprise gene sequence(s) encoding DacA, e.g., from Listeria monocytogenes, wherein DacA is operably linked to a promoter inducible under low oxygen conditions, e.g., a FNR promoter. The bacteria comprising gene sequences encoding dacA comprise a mutation or deletion in dapA. The one or more genetically engineered bacteria further comprise gene sequences encoding feedback-resistant ArgA and the bacterium comprising gene sequences encoding feedback-resistant ArgA further comprises a mutation or deletion in ArgR. In certain embodiments, dacA and feedback-resistant ArgA sequences are integrated into the bacterial chromosome. In one specific embodiment, the one or more genetically engineered bacteria may further comprise mutation(s) or deletion(s) in ThyA. In one specific embodiment, the checkpoint inhibitor is PD-1. In one specific embodiment, the checkpoint inhibitor is PD-L1. In one specific embodiment, the checkpoint inhibitor is CTLA-4. The checkpoint inhibitor may be under control of a constitutive or inducible promoter.

[0869] In one embodiment, dacA circuitry (e.g., from Listeria monocytogenes, e.g., under control of a low oxygen promoter and chromosomally integrated), arginine production/ammonia consumption circuitry (e.g., comprising ArgAfbr, e.g., under the control of a low oxygen inducible promoter and chromosomally integrated and ΔArgR), circuitry for the secretion or display of a checkpoint inhibitor, e.g., anti-PD-1, anti-PD-L1 or anti-CTLA-4, and auxotrophic mutations (mutations or deletions in dapA, and ThyA) are combined in one bacterium. In an alternate embodiment, a bacterial composition comprises a first bacterium comprising gene sequences encoding dacA (e.g., from Listeria monocytogenes, e.g., under control of a low oxygen promoter and chromosomally integrated), further comprising a mutation or deletion in DapA, and with an optional mutation or deletion in ThyA, and a second bacterium comprising gene sequences encoding arginine production/ammonia consumption circuitry (e.g., comprising ArgAfbr, e.g., under the control of a low oxygen inducible promoter and chromosomally integrated and ΔArgR), and optionally a mutation or deletion in ThyA. The composition further comprises a third bacterium engineered to secrete or display the checkpoint inhibitor. Alternatively the first or second bacterium are engineered to secrete or display the checkpoint inhibitor.

### STING Agonist and Checkpoint Inhibitors

[0870] In some embodiments, the one or more genetically engineered bacteria comprise one or more genes encoding enzymes for the production of STING agonist(s) in combination with one or more genes encoding one or more checkpoint inhibitors, e.g., anti-PD-1, anti-PDL-1, and/or anti-CTLA4 antibodies. In some embodiments, the antibodies are secreted from the bacterium. In some embodiments, the antibodies are displayed on the surface of the bacterium. In one embodiment, the STING agonist produced is c-di-AMP. In one embodiment, the genetically engineered bacteria comprises gene sequences encoding a diadenylate cyclase in combination with gene sequences encoding one or more checkpoint inhibitors, e.g., anti-PD-1, anti-PDL-1, and/or anti-CTLA4 antibodies. In some embodiments, the one or more genetically engineered bacteria further comprise a DOM (diffusible outer membrane) mutation, e.g., ΔPAL to improve secretion of the checkpoint inhibitor. In one embodiment, the diadenylate cyclase is from Listeria monocytogenes. In one embodiment, the checkpoint inhibitor is PD-1. In one embodiment, the checkpoint inhibitor is PD-L1. In one embodiment, the checkpoint inhibitor is CTLA-4. In one specific embodiment, the checkpoint inhibition gene circuitry is integrated into the chromosome and is under the control of a low-oxygen promoter, e.g., FNR.

[0871] In alternate embodiments, the disclosure provides a composition comprising a combination (e.g., two or more) of different genetically engineered bacteria, each bacteria encoding a different immune modulator. Accordingly, in one embodiment, the composition comprises genetically engineered bacteria comprising one or more genes encoding enzymes for the production of STING agonist(s) in combination with genetically engineered bacteria comprising one or more genes encoding one or more checkpoint inhibitors, e.g., anti-PD-1, anti-PDL-1, and/or anti-CTLA4 antibodies. In one embodiment, the STING agonist produced is c-di-AMP. In one embodiment, the composition comprises genetically engineered bacteria comprising gene sequences encoding a diadenylate cyclase in combination with genetically engineered bacteria comprising gene sequences encoding one or more checkpoint inhibitors, e.g., anti-PD-1, anti-PDL-1, and/or anti-CTLA4 antibodies. In some embodiments, the genetically engineered bacteria encoding the checkpoint inhibitor further comprise a DOM (diffusible outer membrane) mutation, e.g., ΔPAL to improve secretion of the checkpoint inhibitor. In one embodiment, the diadenylate cyclase is from Listeria monocytogenes. In one embodiment, the checkpoint inhibitor is PD-1. In one embodiment, the checkpoint inhibitor is PD-L1. In one embodiment, the checkpoint inhibitor is CTLA-4. In one specific embodiment, the checkpoint inhibition gene circuitry is integrated into the chromosome and is under the control of a low-oxygen promoter, e.g., FNR.

[0872] In any of these STING agonist and checkpoint inhibitor production embodiments, the genetically engineered bacteria produce at least about 0% to 2% to 4%, 4% to 6%,6% to 8%, 8% to 10%, 10% to 12%, 12% to 14%, 14% to 16%, 16% to 18%, 18% to 20%, 20% to 25%,25% to 30%, 30% to 35%, 35% to 40%,40% to 45% 45% to 50%, 50% to 55%, 55% to 60%, 60% to 65%, 65% to 70% to 80%, 80% to 90%, or 90% to 100% more STING agonist, e.g., cyclic-di-AMP, than unmodified bacteria of the same bacterial subtype under the same conditions.

[0873] In yet another embodiment, the genetically engineered bacteria produce at least about 1.0-1.2-fold, 1.2-1.4-fold, 1.4-1.6-fold, 1.6-1.8-fold, 1.8-2-fold, or two-fold more STING agonist, e.g., cyclic-di-AMP, than unmodified bacteria of the same bacterial subtype under the same conditions. In yet another embodiment, the genetically engineered bacteria produce about three-fold, four-fold, five-fold, six-fold, seven-fold, eight-fold, nine-fold, ten-fold, fifteen-fold, twenty-fold, thirty-fold, forty-fold, or fifty-fold, hundred-fold, five hundred-fold, or one-thousand-fold more STING agonist, e.g., cyclic-di-AMP, than unmodified bacteria of the same bacterial subtype under the same conditions.

[0874] In any of these STING agonist and checkpoint inhibitor production embodiments, the genetically engineered bacteria consume 0% to 2%, 2% to 4%, 4% to 6%,6% to 8%, 8% to 10%, 10% to 12%, 12% to 14%, 14% to 16%, 16% to 18%, 18% to 20%, 20% to 25%,25% to 30%, 30% to 35%, 35% to 40%,40% to 45% 45% to 50%, 50% to 55%, 55% to 60%, 60% to 65%, 65% to 70% to 80%, 80% to 90%, or 90% to 100% more ATP than unmodified bacteria of the same bacterial subtype under the same conditions. In yet another embodiment, the genetically engineered bacteria consume 1.0-1.2-fold, 1.2-1.4-fold, 1.4-1.6-fold, 1.6-1.8-fold, 1.8-2-fold, or two-fold more arginine than unmodified bacteria of the same bacterial subtype under the same conditions. In yet another embodiment, the genetically engineered bacteria consume about three-fold, four-fold, five-fold, six-fold, seven-fold, eight-fold, nine-fold, ten-fold, fifteen-fold, twenty-fold, thirty-fold, forty-fold, fifty-fold, hundred-fold, five hundred-fold, or one-thousand-fold more glutamate than unmodified bacteria of the same bacterial subtype under the same conditions.

[0875] In any of these STING agonist and checkpoint inhibitor production embodiments, the genetically engineered bacteria are capable of reducing cell proliferation by at least about 10% to 20%, 20% to 25%, 25% to 30%, 30% to 40%, 40% to 50%, 50% to 60%, 60% to 70%, 70% to 75%, 75% to 80%, 80% to 85%, 85% to 90%, 90% to 95%, 95% to 99%, or more as compared to an unmodified bacteria of the same subtype under the same conditions. In any of these STING agonist and checkpoint inhibitor production embodiments, the genetically engineered bacteria are capable of reducing tumor growth by at least about 10% to 20%, 20% to 25%, 25% to 30%, 30% to 40%, 40% to 50%, 50% to 60%, 60% to 70%, 70% to 75%, 75% to 80%, 80% to 85%, 85% to 90%, 90% to 95%, 95% to 99%, or more as compared to an unmodified bacteria of the same subtype under the same conditions. In any of these STING agonist and checkpoint inhibitor production embodiments, the genetically engineered bacteria are capable of reducing tumor size by at least about 10% to 20%, 20% to 25%, 25% to 30%, 30% to 40%, 40% to 50%, 50% to 60%, 60% to 70%, 70% to 75%, 75% to 80%, 80% to 85%, 85% to 90%, 90% to 95%, 95% to 99%, or more as compared to an unmodified bacteria of the same subtype under the same conditions. In any of these STING agonist and checkpoint inhibitor production embodiments, the genetically engineered bacteria are capable of reducing tumor volume by at least about 10% to 20%, 20% to 25%, 25% to 30%, 30% to 40%, 40% to 50%, 50% to 60%, 60% to 70%, 70% to 75%, 75% to 80%, 80% to 85%, 85% to 90%, 90% to 95%, 95% to 99%, or more as compared to an unmodified bacteria of the same subtype under the same conditions. In any of these STING agonist and checkpoint inhibitor production embodiments, the genetically engineered bacteria are capable of reducing tumor weight by at least about 10% to 20%, 20% to 25%, 25% to 30%, 30% to 40%, 40% to 50%, 50% to 60%, 60% to 70%, 70% to 75%, 75% to 80%, 80% to 85%, 85% to 90%, 90% to 95%, 95% to 99%, or more as compared to an unmodified bacteria of the same subtype under the same conditions.

[0876] In any of these STING agonist and checkpoint inhibitor production embodiments, the genetically engineered microorganisms are capable of expressing any one or more of the described circuits for STING agonist production and checkpoint inhibitor production, e.g., anti-PD-1, anti-PD-L1 and/or anti-CTLA-4 production, in low-oxygen conditions, and/or in the presence of cancer and/or the tumor microenvironment, or tissue specific molecules or metabolites, and/or in the presence of molecules or metabolites associated with inflammation or immune suppression, and/or in the presence of metabolites that may be present in the gut, and/or in the presence of metabolites that may or may not be present in vivo, and may be present in vitro during strain culture, expansion, production and/or manufacture, such as arabinose, cumate, and salicylate and others described herein. In some embodiments such an inducer may be administered in vivo to induce effector gene expression. In some embodiments, the gene sequences(s) encoding circuitry for STING agonist production and checkpoint inhibitor production, e.g., anti-PD-1, anti-PD-L1 and/or anti-CTLA-4 production, are controlled by a promoter inducible by such conditions and/or inducers. In some embodiments, the gene sequences(s) are controlled by a constitutive promoter, as described herein. In some embodiments, the gene sequences(s) are controlled by a constitutive promoter, and are expressed in in vivo conditions and/or in vitro conditions, e.g., during expansion, production and/or manufacture, as described herein.

[0877] In any of these STING agonist production and checkpoint inhibitor production, e.g., anti-PD-1, anti-PD-L1 and/or anti-CTLA-4 production embodiments, any one or more of the described STING agonist production circuits and checkpoint inhibitor production circuits are present on one or more plasmids (e.g., high copy or low copy) or are integrated into one or more sites in the microorganismal chromosome. Also, in some embodiments, the genetically engineered microorganisms are further capable of expressing any one or more of the described circuits and further comprise one or more of the following: (1) one or more auxotrophies, such as any auxotrophies known in the art and provided herein, e.g., thyA and/or dapA auxotrophy, (2) one or more kill switch circuits, such as any of the kill-switches described herein or otherwise known in the art, (3) one or more antibiotic resistance circuits, (4) one or more transporters for importing biological molecules or substrates, such any of the transporters described herein or otherwise known in the art, (5) one or more secretion circuits, such as any of the secretion circuits described herein and otherwise known in the art, (6) one or more surface display circuits, such as any of the surface display circuits described herein and otherwise known in the art and (7) one or more circuits for the production or degradation of one or more metabolites (e.g., arginine production/ammonia, tryptophan, arginine production/ammonia, arginine, and kynurenine) described herein (8) combinations of one or more of such additional circuits.

[0878] In any of these embodiments, the one or more bacteria genetically engineered to produce STING agonists and comprise checkpoint inhibitor production circuits may be administered alone or in combination with one or more immune checkpoint inhibitors described herein, including but not limited to anti-CTLA4, anti-PD1, or anti-PD-L1 antibodies. In any of these embodiments, the one or more bacteria genetically engineered to produce STING agonists and comprise checkpoint inhibitor production circuits may be genetically engineered to produce and secrete or display on their surface one or more immune checkpoint inhibitors described herein, including but not limited to anti-CTLA4, anti-PD1, or anti-PD-L1 antibodies.

[0879] In any of these embodiments, the one or more bacteria genetically engineered to produce STING agonists and comprise checkpoint inhibitor production circuits may be administered alone or in combination with one or more immune stimulatory agonists described herein, e.g., agonistic antibodies, including but not limited to anti-OX40, anti-41BB, or anti-GITR antibodies. In any of these embodiments, the one or more bacteria genetically engineered to produce STING agonists and comprise checkpoint inhibitor production circuits may be genetically engineered to produce and secrete or display on their surface one or more immune stimulatory agonists described herein, e.g., agonistic antibodies, including but not limited to anti-OX40, anti-41BB, or anti-GITR antibodies.

### STING Agonist and Immune Stimulatory Agonists

[0880] In some embodiments, the one or more genetically engineered bacteria comprise one or more genes encoding enzymes for the production of STING agonist(s) in combination with one or more genes encoding one or more immune stimulator agonists, e.g., anti-OX40, anti-41BB, and/or anti-GITR antibodies. In some embodiments, the antibodies are secreted from the bacterium. In some embodiments, the antibodies are displayed on the surface of the bacterium. In one embodiment, the STING agonist produced is c-di-AMP. In one embodiment, the genetically engineered bacteria comprises gene sequences encoding a diadenylate cyclase in combination with gene sequences encoding one or more immune stimulator agonists, e.g., anti-OX40, anti-41BB, and/or anti-GITR antibodies. In some embodiments, the one or more genetically engineered bacteria further comprise a DOM (diffusible outer membrane) mutation, e.g., ΔPAL to improve secretion of the immune stimulator agonist. In one embodiment, the diadenylate cyclase is from Listeria monocytogenes. In one embodiment, the immune stimulator agonist is OX40. In one embodiment, the immune stimulator agonist is 41BB. In one embodiment, the immune stimulator agonist is GITR. In one specific embodiment, the checkpoint inhibition gene circuitry is integrated into the chromosome and is under the control of a low-oxygen promoter, e.g., FNR.

[0881] In alternate embodiments, the disclosure provides a composition comprising a combination (e.g., two or more) of different genetically engineered bacteria, each bacteria encoding a different immune modulator. Accordingly, in one embodiment, the composition comprises genetically engineered bacteria comprising one or more genes encoding enzymes for the production of STING agonist(s) in combination with genetically engineered bacteria comprising one or more genes encoding one or more immune stimulator agonists, e.g., anti-OX40, anti-41BB, and/or anti-GITR antibodies. In one embodiment, the STING agonist produced is c-di-AMP. In one embodiment, the composition comprises genetically engineered bacteria comprising gene sequences encoding a diadenylate cyclase in combination with genetically engineered bacteria comprising gene sequences encoding one or more immune stimulator agonists, e.g., anti-OX40, anti-41BB, and/or anti-GITR antibodies. In some embodiments, the genetically engineered bacteria encoding the immune stimulator agonist further comprise a DOM (diffusible outer membrane) mutation, e.g., ΔPAL to improve secretion of the immune stimulator agonist. In one embodiment, the diadenylate cyclase is from Listeria monocytogenes. In one embodiment, the immune stimulator agonist is OX40. In one embodiment, the immune stimulator agonist is 41BB. In one embodiment, the immune stimulator agonist is GITR. In one specific embodiment, the checkpoint inhibition gene circuitry is integrated into the chromosome and is under the control of a low-oxygen promoter, e.g., FNR.

[0882] In any of these STING agonist and immune stimulator agonist production embodiments, the genetically engineered bacteria produce at least about 0% to 2% to 4%, 4% to 6%,6% to 8%, 8% to 10%, 10% to 12%, 12% to 14%, 14% to 16%, 16% to 18%, 18% to 20%, 20% to 25%,25% to 30%, 30% to 35%, 35% to 40%,40% to 45% 45% to 50%, 50% to 55%, 55% to 60%, 60% to 65%, 65% to 70% to 80%, 80% to 90%, or 90% to 100% more STING agonist, e.g., cyclic-di-AMP, than unmodified bacteria of the same bacterial subtype under the same conditions.

[0883] In yet another embodiment, the genetically engineered bacteria produce at least about 1.0-1.2-fold, 1.2-1.4-fold, 1.4-1.6-fold, 1.6-1.8-fold, 1.8-2-fold, or two-fold more STING agonist, e.g., cyclic-di-AMP, than unmodified bacteria of the same bacterial subtype under the same conditions. In yet another embodiment, the genetically engineered bacteria produce about three-fold, four-fold, five-fold, six-fold, seven-fold, eight-fold, nine-fold, ten-fold, fifteen-fold, twenty-fold, thirty-fold, forty-fold, or fifty-fold, hundred-fold, five hundred-fold, or one-thousand-fold more STING agonist, e.g., cyclic-di-AMP, than unmodified bacteria of the same bacterial subtype under the same conditions.

[0884] In any of these STING agonist and immune stimulator agonist production embodiments, the genetically engineered bacteria consume 0% to 2%, 2% to 4%, 4% to 6%,6% to 8%, 8% to 10%, 10% to 12%, 12% to 14%, 14% to 16%, 16% to 18%, 18% to 20%, 20% to 25%,25% to 30%, 30% to 35%, 35% to 40%,40% to 45% 45% to 50%, 50% to 55%, 55% to 60%, 60% to 65%, 65% to 70% to 80%, 80% to 90%, or 90% to 100% more ATP than unmodified bacteria of the same bacterial subtype under the same conditions. In yet another embodiment, the genetically engineered bacteria consume 1.0-1.2-fold, 1.2-1.4-fold, 1.4-1.6-fold, 1.6-1.8-fold, 1.8-2-fold, or two-fold more arginine than unmodified bacteria of the same bacterial subtype under the same conditions. In yet another embodiment, the genetically engineered bacteria consume about three-fold, four-fold, five-fold, six-fold, seven-fold, eight-fold, nine-fold, ten-fold, fifteen-fold, twenty-fold, thirty-fold, forty-fold, fifty-fold, hundred-fold, five hundred-fold, or one-thousand-fold more glutamate than unmodified bacteria of the same bacterial subtype under the same conditions.

[0885] In any of these STING agonist and immune stimulator agonist production embodiments, the genetically engineered bacteria are capable of reducing cell proliferation by at least about 10% to 20%, 20% to 25%, 25% to 30%, 30% to 40%, 40% to 50%, 50% to 60%, 60% to 70%, 70% to 75%, 75% to 80%, 80% to 85%, 85% to 90%, 90% to 95%, 95% to 99%, or more as compared to an unmodified bacteria of the same subtype under the same conditions. In any of these STING agonist and immune stimulator agonist production embodiments, the genetically engineered bacteria are capable of reducing tumor growth by at least about 10% to 20%, 20% to 25%, 25% to 30%, 30% to 40%, 40% to 50%, 50% to 60%, 60% to 70%, 70% to 75%, 75% to 80%, 80% to 85%, 85% to 90%, 90% to 95%, 95% to 99%, or more as compared to an unmodified bacteria of the same subtype under the same conditions. In any of these STING agonist and immune stimulator agonist production embodiments, the genetically engineered bacteria are capable of reducing tumor size by at least about 10% to 20%, 20% to 25%, 25% to 30%, 30% to 40%, 40% to 50%, 50% to 60%, 60% to 70%, 70% to 75%, 75% to 80%, 80% to 85%, 85% to 90%, 90% to 95%, 95% to 99%, or more as compared to an unmodified bacteria of the same subtype under the same conditions. In any of these STING agonist and immune stimulator agonist production embodiments, the genetically engineered bacteria are capable of reducing tumor volume by at least about 10% to 20%, 20% to 25%, 25% to 30%, 30% to 40%, 40% to 50%, 50% to 60%, 60% to 70%, 70% to 75%, 75% to 80%, 80% to 85%, 85% to 90%, 90% to 95%, 95% to 99%, or more as compared to an unmodified bacteria of the same subtype under the same conditions. In any of these STING agonist and immune stimulator agonist production embodiments, the genetically engineered bacteria are capable of reducing tumor weight by at least about 10% to 20%, 20% to 25%, 25% to 30%, 30% to 40%, 40% to 50%, 50% to 60%, 60% to 70%, 70% to 75%, 75% to 80%, 80% to 85%, 85% to 90%, 90% to 95%, 95% to 99%, or more as compared to an unmodified bacteria of the same subtype under the same conditions.

[0886] In any of these STING agonist and immune stimulator agonist production embodiments, the genetically engineered microorganisms are capable of expressing any one or more of the described circuits for STING agonist production and immune stimulator agonist production, e.g., anti-OX40, anti-41BB and/or anti-GITR production, in low-oxygen conditions, and/or in the presence of cancer and/or the tumor microenvironment, or tissue specific molecules or metabolites, and/or in the presence of molecules or metabolites associated with inflammation or immune suppression, and/or in the presence of metabolites that may be present in the gut, and/or in the presence of metabolites that may or may not be present in vivo, and may be present in vitro during strain culture, expansion, production and/or manufacture, such as arabinose, cumate, and salicylate and others described herein. In some embodiments such an inducer may be administered in vivo to induce effector gene expression. In some embodiments, the gene sequences(s) encoding circuitry for STING agonist production and immune stimulator agonist production, e.g., anti-OX40, anti-41BB and/or anti-GITR production, are controlled by a promoter inducible by such conditions and/or inducers. In some embodiments, the gene sequences(s) are controlled by a constitutive promoter, as described herein. In some embodiments, the gene sequences(s) are controlled by a constitutive promoter, and are expressed in in vivo conditions and/or in vitro conditions, e.g., during expansion, production and/or manufacture, as described herein.

[0887] In any of these STING agonist production and immune stimulator agonist production, e.g., anti-OX40, anti-41BB and/or anti-GITR production embodiments, any one or more of the described STING agonist production circuits and immune stimulator agonist production circuits are present on one or more plasmids (e.g., high copy or low copy) or are integrated into one or more sites in the microorganismal chromosome. Also, in some embodiments, the genetically engineered microorganisms are further capable of expressing any one or more of the described circuits and further comprise one or more of the following: (1) one or more auxotrophies, such as any auxotrophies known in the art and provided herein, e.g., thyA and/or dapA auxotrophy, (2) one or more kill switch circuits, such as any of the kill-switches described herein or otherwise known in the art, (3) one or more antibiotic resistance circuits, (4) one or more transporters for importing biological molecules or substrates, such any of the transporters described herein or otherwise known in the art, (5) one or more secretion circuits, such as any of the secretion circuits described herein and otherwise known in the art, (6) one or more surface display circuits, such as any of the surface display circuits described herein and otherwise known in the art and (7) one or more circuits for the production or degradation of one or more metabolites (e.g., arginine production/ammonia, tryptophan, arginine production/ammonia, arginine, and kynurenine) described herein (8) combinations of one or more of such additional circuits.

[0888] In any of these embodiments, the one or more bacteria genetically engineered to produce STING agonists and comprise immune stimulator agonist production circuits may be administered alone or in combination with one or more immune stimulator agonists described herein, including but not limited to anti-CTLA-4, anti-PD-1, or anti-PD-L1 antibodies. In any of these embodiments, the one or more bacteria genetically engineered to produce STING agonists and comprise immune stimulator agonist production circuits may be genetically engineered to produce and secrete or display on their surface one or more immune stimulator agonists described herein, including but not limited to anti-CTLA-4, anti-PD-1, or anti-PD-L1 antibodies.

[0889] In any of these embodiments, the one or more bacteria genetically engineered to produce STING agonists and comprise immune stimulator agonist production circuits may be administered alone or in combination with one or more immune stimulatory agonists described herein, e.g., agonistic antibodies, including but not limited to anti-OX40, anti-41BB, or anti-GITR antibodies. In any of these embodiments, the one or more bacteria genetically engineered to produce STING agonists and comprise immune stimulator agonist production circuits may be genetically engineered to produce and secrete or display on their surface one or more immune stimulatory agonists described herein, e.g., agonistic antibodies, including but not limited to anti-OX40, anti-41BB, or anti-GITR antibodies.

### 5-FC to 5-FU Combinations

[0890] In one embodiment, the genetically engineered bacteria comprise one or more genes encoding enzymes for the conversion of 5-FC to 5-FU in combination with one or more genes encoding enzymes for the consumption of kynurenine. In one embodiment, the genetically engineered bacteria comprises gene sequences encoding a cytosine deaminase in combination with gene sequences encoding a kynureninase. In one embodiment, the cytosine deaminase is from E. coli. In one embodiment, the cytosine deaminase is from yeast. In one embodiment, the kynureninase is from Pseudomonas fluorescens. In one specific embodiment, the cytosine deaminase is from E. coli and the kynureninase is from Pseudomonas fluorescens. In one embodiment, the kynureninase is from Pseudomonas fluorescens. In one specific embodiment, the kynureninase from Pseudomonas fluorescens is chromosomally integrated and under control of a constitutive promoter.

[0891] In alternate embodiments, the disclosure provides a composition comprising a combination (e.g., two or more) of different genetically engineered bacteria, each bacteria encoding a different immune modulator. Accordingly, in one embodiment, the composition comprises genetically engineered bacteria comprising one or more genes encoding enzymes for the conversion of 5-FC to 5-FU in combination with genetically engineered bacteria comprising one or more genes encoding enzymes for the consumption of kynurenine. In one embodiment, the composition comprises genetically engineered bacteria comprising gene sequences encoding a cytosine deaminase in combination with genetically engineered bacteria comprising gene sequences encoding a kynureninase. In one embodiment, the cytosine deaminase is from E. coli. In one embodiment, the cytosine deaminase is from yeast. In one embodiment, the kynureninase is from Pseudomonas fluorescens. In one specific embodiment, the cytosine deaminase is from E. coli and the kynureninase is from Pseudomonas fluorescens. In one embodiment, the kynureninase is from Pseudomonas fluorescens. In one specific embodiment, the kynureninase from Pseudomonas fluorescens is chromosomally integrated and under control of a constitutive promoter.

[0892] In any of these 5-FC to 5-FU conversion and kynurenine consumption embodiments, the genetically engineered bacteria produce at least about 0% to 2% to 4%, 4% to 6%,6% to 8%, 8% to 10%, 10% to 12%, 12% to 14%, 14% to 16%, 16% to 18%, 18% to 20%, 20% to 25%,25% to 30%, 30% to 35%, 35% to 40%,40% to 45% 45% to 50%, 50% to 55%, 55% to 60%, 60% to 65%, 65% to 70% to 80%, 80% to 90%, or 90% to 100% more STING agonist, e.g., cyclic-di-AMP, than unmodified bacteria of the same bacterial subtype under the same conditions.

[0893] In any of these 5-FC to 5-FU conversion and kynurenine consumption embodiments, the genetically engineered bacteria consume 0% to 2% to 4%, 4% to 6%,6% to 8%, 8% to 10%, 10% to 12%, 12% to 14%, 14% to 16%, 16% to 18%, 18% to 20%, 20% to 25%,25% to 30%, 30% to 35%, 35% to 40%,40% to 45% 45% to 50%, 50% to 55%, 55% to 60%, 60% to 65%, 65% to 70% to 80%, 80% to 90%, or 90% to 100% more kynurenine than unmodified bacteria of the same bacterial subtype under the same conditions.

[0894] In yet another embodiment, the genetically engineered bacteria convert 1.0-1.2-fold, 1.2-1.4-fold, 1.4-1.6-fold, 1.6-1.8-fold, 1.8-2-fold, or two-fold more 5-FC into 5-FU, than unmodified bacteria of the same bacterial subtype under the same conditions. In yet another embodiment, the genetically engineered bacteria produce about three-fold, four-fold, five-fold, six-fold, seven-fold, eight-fold, nine-fold, ten-fold, fifteen-fold, twenty-fold, thirty-fold, forty-fold, or fifty-fold, hundred-fold, five hundred-fold, or one-thousand-fold more 5-FU, than unmodified bacteria of the same bacterial subtype under the same conditions.

[0895] In yet another embodiment, the genetically engineered bacteria consume 1.0-1.2-fold, 1.2-1.4-fold, 1.4-1.6-fold, 1.6-1.8-fold, 1.8-2-fold, or two-fold more kynurenine than unmodified bacteria of the same bacterial subtype under the same conditions. In yet another embodiment, the genetically engineered bacteria consume about three-fold, four-fold, five-fold, six-fold, seven-fold, eight-fold, nine-fold, ten-fold, fifteen-fold, twenty-fold, thirty-fold, forty-fold, or fifty-fold, hundred-fold, five hundred-fold, or one-thousand-fold more kynurenine than unmodified bacteria of the same bacterial subtype under the same conditions.

[0896] In any of these 5-FC to 5-FU conversion and kynurenine consumption embodiments, the genetically engineered bacteria consume 0% to 2% to 4%, 4% to 6%,6% to 8%, 8% to 10%, 10% to 12%, 12% to 14%, 14% to 16%, 16% to 18%, 18% to 20%, 20% to 25%,25% to 30%, 30% to 35%, 35% to 40%,40% to 45% 45% to 50%, 50% to 55%, 55% to 60%, 60% to 65%, 65% to 70% to 80%, 80% to 90%, or 90% to 100% more 5-FC than unmodified bacteria of the same bacterial subtype under the same conditions. In yet another embodiment, the genetically engineered bacteria consume 1.0-1.2-fold, 1.2-1.4-fold, 1.4-1.6-fold, 1.6-1.8-fold, 1.8-2-fold, or two-fold more 5-FC than unmodified bacteria of the same bacterial subtype under the same conditions. In yet another embodiment, the genetically engineered bacteria consume about three-fold, four-fold, five-fold, six-fold, seven-fold, eight-fold, nine-fold, ten-fold, fifteen-fold, twenty-fold, thirty-fold, forty-fold, fifty-fold, hundred-fold, five hundred-fold, or one-thousand-fold more 5-FC than unmodified bacteria of the same bacterial subtype under the same conditions.

[0897] In any of these 5-FC to 5-FU conversion and kynurenine consumption embodiments, the genetically engineered bacteria produce at least about 0% to 2% to 4%, 4% to 6%,6% to 8%, 8% to 10%, 10% to 12%, 12% to 14%, 14% to 16%, 16% to 18%, 18% to 20%, 20% to 25%,25% to 30%, 30% to 35%, 35% to 40%,40% to 45% 45% to 50%, 50% to 55%, 55% to 60%, 60% to 65%, 65% to 70% to 80%, 80% to 90%, or 90% to 100% more tryptophan than unmodified bacteria of the same bacterial subtype under the same conditions. In yet another embodiment, the genetically engineered bacteria produce at least about 1.0-1.2-fold, 1.2-1.4-fold, 1.4-1.6-fold, 1.6-1.8-fold, 1.8-2-fold, or two-fold more tryptophan than unmodified bacteria of the same bacterial subtype under the same conditions. In yet another embodiment, the genetically engineered bacteria produce about three-fold, four-fold, five-fold, six-fold, seven-fold, eight-fold, nine-fold, ten-fold, fifteen-fold, twenty-fold, thirty-fold, forty-fold, fifty-fold, hundred-fold, five hundred-fold, or one-thousand-fold more tryptophan than unmodified bacteria of the same bacterial subtype under the same conditions.

[0898] In any of these 5-FC to 5-FU conversion and kynurenine consumption embodiments, the genetically engineered bacteria are capable of reducing cell proliferation by at least about 10% to 20%, 20% to 25%, 25% to 30%, 30% to 40%, 40% to 50%, 50% to 60%, 60% to 70%, 70% to 75%, 75% to 80%, 80% to 85%, 85% to 90%, 90% to 95%, 95% to 99%, or more as compared to an unmodified bacteria of the same subtype under the same conditions. In any of these 5-FC to 5-FU conversion and kynurenine consumption embodiments, the genetically engineered bacteria are capable of reducing tumor growth by at least about 10% to 20%, 20% to 25%, 25% to 30%, 30% to 40%, 40% to 50%, 50% to 60%, 60% to 70%, 70% to 75%, 75% to 80%, 80% to 85%, 85% to 90%, 90% to 95%, 95% to 99%, or more as compared to an unmodified bacteria of the same subtype under the same conditions. In any of these 5-FC to 5-FU conversion and kynurenine consumption embodiments, the genetically engineered bacteria are capable of reducing tumor size by at least about 10% to 20%, 20% to 25%, 25% to 30%, 30% to 40%, 40% to 50%, 50% to 60%, 60% to 70%, 70% to 75%, 75% to 80%, 80% to 85%, 85% to 90%, 90% to 95%, 95% to 99%, or more as compared to an unmodified bacteria of the same subtype under the same conditions. In any of these 5-FC to 5-FU conversion and kynurenine consumption embodiments, the genetically engineered bacteria are capable of reducing tumor volume by at least about 10% to 20%, 20% to 25%, 25% to 30%, 30% to 40%, 40% to 50%, 50% to 60%, 60% to 70%, 70% to 75%, 75% to 80%, 80% to 85%, 85% to 90%, 90% to 95%, 95% to 99%, or more as compared to an unmodified bacteria of the same subtype under the same conditions. In any of these 5-FC to 5-FU conversion and kynurenine consumption embodiments, the genetically engineered bacteria are capable of reducing tumor weight by at least about 10% to 20%, 20% to 25%, 25% to 30%, 30% to 40%, 40% to 50%, 50% to 60%, 60% to 70%, 70% to 75%, 75% to 80%, 80% to 85%, 85% to 90%, 90% to 95%, 95% to 99%, or more as compared to an unmodified bacteria of the same subtype under the same conditions.

[0899] In one embodiment, the genetically engineered bacteria comprise one or more genes encoding enzymes for the conversion of 5-FC to 5-FU in combination with one or more genes encoding enzymes for the consumption of adenosine. In one embodiment, the genetically engineered bacteria comprises gene sequences encoding a cytosine deaminase in combination with gene sequences encoding an adenosine degradation pathway. In one embodiment, the cytosine deaminase is from E. coli. In one embodiment, the cytosine deaminase is from yeast. In one embodiment, the gene sequences encoding the adenosine degradation pathway enzymes comprise one or more genes selected from xdhA, xdhB, xdhC, add, xapA, deoD, and nupC. In one embodiment, the gene sequences encoding the adenosine degradation pathway comprise xdhA, xdhB, xdhC, add, xapA, deoD, and nupC. In one embodiment, the adenosine pathway enzymes are from E. coli. In one specific embodiment, the cytosine deaminase is from E. coli and the gene sequences encoding the adenosine degradation pathway comprise xdhA, xdhB, xdhC, add, xapA, deoD, and nupC, e.g., from E. coli. In on specific embodiment, the adenosine pathway enzymes are integrated into the chromosome and are under the control of a low-oxygen promoter, e.g., FNR.

[0900] In alternate embodiments, the disclosure provides a composition comprising a combination (e.g., two or more) of different genetically engineered bacteria, each bacteria encoding a different immune modulator. Accordingly, in one embodiment, the composition comprises genetically engineered bacteria comprising one or more genes encoding enzymes for the conversion of 5-FC to 5-FU in combination with one or more genes encoding enzymes for the consumption of adenosine. In one embodiment, the composition comprises genetically engineered bacteria comprising gene sequences encoding a cytosine deaminase in combination with genetically engineered bacteria comprising gene sequences encoding an adenosine degradation pathway. In one embodiment, the cytosine deaminase is from E. coli. In one embodiment, the cytosine deaminase is from yeast. In one embodiment, the gene sequences encoding the adenosine degradation pathway enzymes comprise one or more genes selected from xdhA, xdhB, xdhC, add, xapA, deoD, and nupC. In one embodiment, the gene sequences encoding the adenosine degradation pathway comprise xdhA, xdhB, xdhC, add, xapA, deoD, and nupC. In one embodiment, the adenosine pathway enzymes are from E. coli. In one specific embodiment, the cytosine deaminase is from E. coli and the gene sequences encoding the adenosine degradation pathway comprise xdhA, xdhB, xdhC, add, xapA, deoD, and nupC, e.g., from E. coli. In on specific embodiment, the adenosine pathway enzymes are integrated into the chromosome and are under the control of a low-oxygen promoter, e.g., FNR.

[0901] In any of these 5-FC to 5-FU conversion and adenosine consumption embodiments, the genetically engineered bacteria produce at least about 0% to 2%, 2% to 4%, 4% to 6%,6% to 8%, 8% to 10%, 10% to 12%, 12% to 14%, 14% to 16%, 16% to 18%, 18% to 20%, 20% to 25%,25% to 30%, 30% to 35%, 35% to 40%,40% to 45% 45% to 50%, 50% to 55%, 55% to 60%, 60% to 65%, 65% to 70% to 80%, 80% to 90%, or 90% to 100% more STING agonist, e.g., cyclic-di-AMP, than unmodified bacteria of the same bacterial subtype under the same conditions.

[0902] In any of these 5-FC to 5-FU conversion and adenosine consumption embodiments, the genetically engineered bacteria consume 0% to 2%, 2% to 4%, 4% to 6%,6% to 8%, 8% to 10%, 10% to 12%, 12% to 14%, 14% to 16%, 16% to 18%, 18% to 20%, 20% to 25%,25% to 30%, 30% to 35%, 35% to 40%,40% to 45% 45% to 50%, 50% to 55%, 55% to 60%, 60% to 65%, 65% to 70% to 80%, 80% to 90%, or 90% to 100% more adenosine than unmodified bacteria of the same bacterial subtype under the same conditions.

[0903] In yet another embodiment, the genetically engineered bacteria produce at least about 1.0-1.2-fold, 1.2-1.4-fold, 1.4-1.6-fold, 1.6-1.8-fold, 1.8-2-fold, or two-fold more 5-FU, than unmodified bacteria of the same bacterial subtype under the same conditions. In yet another embodiment, the genetically engineered bacteria produce about three-fold, four-fold, five-fold, six-fold, seven-fold, eight-fold, nine-fold, ten-fold, fifteen-fold, twenty-fold, thirty-fold, forty-fold, or fifty-fold, hundred-fold, five hundred-fold, or one-thousand-fold more 5-FU, than unmodified bacteria of the same bacterial subtype under the same conditions.

[0904] In yet another embodiment, the genetically engineered bacteria consume 1.0-1.2-fold, 1.2-1.4-fold, 1.4-1.6-fold, 1.6-1.8-fold, 1.8-2-fold, or two-fold more adenosine than unmodified bacteria of the same bacterial subtype under the same conditions. In yet another embodiment, the genetically engineered bacteria consume about three-fold, four-fold, five-fold, six-fold, seven-fold, eight-fold, nine-fold, ten-fold, fifteen-fold, twenty-fold, thirty-fold, forty-fold, or fifty-fold, hundred-fold, five hundred-fold, or one-thousand-fold more adenosine than unmodified bacteria of the same bacterial subtype under the same conditions.

[0905] In any of these 5-FC to 5-FU conversion and adenosine consumption embodiments, the genetically engineered bacteria consume 0% to 2% to 4%, 4% to 6%,6% to 8%, 8% to 10%, 10% to 12%, 12% to 14%, 14% to 16%, 16% to 18%, 18% to 20%, 20% to 25%,25% to 30%, 30% to 35%, 35% to 40%,40% to 45% 45% to 50%, 50% to 55%, 55% to 60%, 60% to 65%, 65% to 70% to 80%, 80% to 90%, or 90% to 100% more 5-FC than unmodified bacteria of the same bacterial subtype under the same conditions. In yet another embodiment, the genetically engineered bacteria consume 1.0-1.2-fold, 1.2-1.4-fold, 1.4-1.6-fold, 1.6-1.8-fold, 1.8-2-fold, or two-fold more adenosine than unmodified bacteria of the same bacterial subtype under the same conditions. In yet another embodiment, the genetically engineered bacteria consume about three-fold, four-fold, five-fold, six-fold, seven-fold, eight-fold, nine-fold, ten-fold, fifteen-fold, twenty-fold, thirty-fold, forty-fold, fifty-fold, hundred-fold, five hundred-fold, or one-thousand-fold more 5-FC than unmodified bacteria of the same bacterial subtype under the same conditions.

[0906] In any of these 5-FC to 5-FU conversion and adenosine consumption embodiments, the genetically engineered bacteria produce at least about 0% to 2% to 4%, 4% to 6%,6% to 8%, 8% to 10%, 10% to 12%, 12% to 14%, 14% to 16%, 16% to 18%, 18% to 20%, 20% to 25%,25% to 30%, 30% to 35%, 35% to 40%,40% to 45% 45% to 50%, 50% to 55%, 55% to 60%, 60% to 65%, 65% to 70% to 80%, 80% to 90%, or 90% to 100% more urate than unmodified bacteria of the same bacterial subtype under the same conditions. In yet another embodiment, the genetically engineered bacteria produce at least about 1.0-1.2-fold, 1.2-1.4-fold, 1.4-1.6-fold, 1.6-1.8-fold, 1.8-2-fold, or two-fold more urate than unmodified bacteria of the same bacterial subtype under the same conditions. In yet another embodiment, the genetically engineered bacteria produce about three-fold, four-fold, five-fold, six-fold, seven-fold, eight-fold, nine-fold, ten-fold, fifteen-fold, twenty-fold, thirty-fold, forty-fold, fifty-fold, hundred-fold, five hundred-fold, or one-thousand-fold more urate than unmodified bacteria of the same bacterial subtype under the same conditions.

[0907] In any of these 5-FC to 5-FU conversion and adenosine consumption embodiments, the genetically engineered bacteria are capable of reducing cell proliferation by at least about 10% to 20%, 20% to 25%, 25% to 30%, 30% to 40%, 40% to 50%, 50% to 60%, 60% to 70%, 70% to 75%, 75% to 80%, 80% to 85%, 85% to 90%, 90% to 95%, 95% to 99%, or more as compared to an unmodified bacteria of the same subtype under the same conditions. In any of these STING agonist production and adenosine consumption embodiments, the genetically engineered bacteria are capable of reducing tumor growth by at least about 10% to 20%, 20% to 25%, 25% to 30%, 30% to 40%, 40% to 50%, 50% to 60%, 60% to 70%, 70% to 75%, 75% to 80%, 80% to 85%, 85% to 90%, 90% to 95%, 95% to 99%, or more as compared to an unmodified bacteria of the same subtype under the same conditions. In any of these 5-FC to 5-FU conversion and adenosine consumption embodiments, the genetically engineered bacteria are capable of reducing tumor size by at least about 10% to 20%, 20% to 25%, 25% to 30%, 30% to 40%, 40% to 50%, 50% to 60%, 60% to 70%, 70% to 75%, 75% to 80%, 80% to 85%, 85% to 90%, 90% to 95%, 95% to 99%, or more as compared to an unmodified bacteria of the same subtype under the same conditions. In any of these 5-FC to 5-FU conversion and adenosine consumption embodiments, the genetically engineered bacteria are capable of reducing tumor volume by at least about 10% to 20%, 20% to 25%, 25% to 30%, 30% to 40%, 40% to 50%, 50% to 60%, 60% to 70%, 70% to 75%, 75% to 80%, 80% to 85%, 85% to 90%, 90% to 95%, 95% to 99%, or more as compared to an unmodified bacteria of the same subtype under the same conditions. In any of these 5-FC to 5-FU conversion and adenosine consumption embodiments, the genetically engineered bacteria are capable of reducing tumor weight by at least about 10% to 20%, 20% to 25%, 25% to 30%, 30% to 40%, 40% to 50%, 50% to 60%, 60% to 70%, 70% to 75%, 75% to 80%, 80% to 85%, 85% to 90%, 90% to 95%, 95% to 99%, or more as compared to an unmodified bacteria of the same subtype under the same conditions.

[0908] In one embodiment, the genetically engineered bacteria comprise one or more genes encoding enzymes for the production 5-FU in combination with one or more genes encoding enzymes for the production of arginine. In one embodiment, the genetically engineered bacteria comprises gene sequences encoding a cytosine deaminase in combination with gene sequences encoding an arginine production pathway. In one embodiment, the cytosine deaminase is from E. coli. In one embodiment, the cytosine deaminase is from yeast. In one embodiment, the gene sequences encoding the arginine production circuit comprise feedback resistant ArgA (ArgAfbr) and a deletion in the endogenous arginine operon repressor ArgR. In one embodiment, the ArgAfbr is from E. coli. In one specific embodiment, ArgAfbr is integrated into the chromosome and is under the control of a low-oxygen promoter, e.g., FNR.

[0909] In alternate embodiments, the disclosure provides a composition comprising a combination (e.g., two or more) of different genetically engineered bacteria, each bacteria encoding a different immune modulator. Accordingly, in one embodiment, the composition comprises genetically engineered bacteria comprising one or more genes encoding enzymes for the production 5-FU in combination with genetically engineered bacteria comprising one or more genes encoding enzymes for the production of arginine In one embodiment, the composition comprises genetically engineered bacteria comprising gene sequences encoding a cytosine deaminase in combination with genetically engineered bacteria comprising gene sequences encoding an arginine production pathway. In one embodiment, the cytosine deaminase is from E. coli. In one embodiment, the cytosine deaminase is from yeast. In one embodiment, the gene sequences encoding the arginine production circuit comprise feedback resistant ArgA (ArgAfbr) and a deletion in the endogenous arginine operon repressor ArgR. In one embodiment, the ArgAfbr is from E. coli. In one specific embodiment, ArgAfbr is integrated into the chromosome and is under the control of a low-oxygen promoter, e.g., FNR.

[0910] In any of these 5-FC to 5-FU conversion and arginine production embodiments, the genetically engineered bacteria produce at least about 0% to 2% to 4%, 4% to 6%,6% to 8%, 8% to 10%, 10% to 12%, 12% to 14%, 14% to 16%, 16% to 18%, 18% to 20%, 20% to 25%,25% to 30%, 30% to 35%, 35% to 40%,40% to 45% 45% to 50%, 50% to 55%, 55% to 60%, 60% to 65%, 65% to 70% to 80%, 80% to 90%, or 90% to 100% more 5-FU, than unmodified bacteria of the same bacterial subtype under the same conditions.

[0911] In any of the 5-FC to 5-FU conversion and arginine production embodiments, the genetically engineered bacteria produce at least about 0% to 2%, 2% to 4%, 4% to 6%,6% to 8%, 8% to 10%, 10% to 12%, 12% to 14%, 14% to 16%, 16% to 18%, 18% to 20%, 20% to 25%,25% to 30%, 30% to 35%, 35% to 40%,40% to 45% 45% to 50%, 50% to 55%, 55% to 60%, 60% to 65%, 65% to 70% to 80%, 80% to 90%, or 90% to 100% more arginine than unmodified bacteria of the same bacterial subtype under the same conditions.

[0912] In yet another embodiment, the genetically engineered bacteria produce at least about 1.0-1.2-fold, 1.2-1.4-fold, 1.4-1.6-fold, 1.6-1.8-fold, 1.8-2-fold, or two-fold more 5-FU, than unmodified bacteria of the same bacterial subtype under the same conditions. In yet another embodiment, the genetically engineered bacteria produce about three-fold, four-fold, five-fold, six-fold, seven-fold, eight-fold, nine-fold, ten-fold, fifteen-fold, twenty-fold, thirty-fold, forty-fold, or fifty-fold, hundred-fold, five hundred-fold, or one-thousand-fold more 5-FU than unmodified bacteria of the same bacterial subtype under the same conditions.

[0913] In yet another embodiment, the genetically engineered bacteria produce at least about 1.0-1.2-fold, 1.2-1.4-fold, 1.4-1.6-fold, 1.6-1.8-fold, 1.8-2-fold, or two-fold more arginine than unmodified bacteria of the same bacterial subtype under the same conditions. In yet another embodiment, the genetically engineered bacteria produce about three-fold, four-fold, five-fold, six-fold, seven-fold, eight-fold, nine-fold, ten-fold, fifteen-fold, twenty-fold, thirty-fold, forty-fold, or fifty-fold, hundred-fold, five hundred-fold, or one-thousand-fold more arginine than unmodified bacteria of the same bacterial subtype under the same conditions.

[0914] In any of these 5-FC to 5-FU conversion and arginine production embodiments, the genetically engineered bacteria consume 0% to 2%, 2% to 4%, 4% to 6%,6% to 8%, 8% to 10%, 10% to 12%, 12% to 14%, 14% to 16%, 16% to 18%, 18% to 20%, 20% to 25%,25% to 30%, 30% to 35%, 35% to 40%,40% to 45% 45% to 50%, 50% to 55%, 55% to 60%, 60% to 65%, 65% to 70% to 80%, 80% to 90%, or 90% to 100% more 5-FC than unmodified bacteria of the same bacterial subtype under the same conditions. In yet another embodiment, the genetically engineered bacteria consume 1.0-1.2-fold, 1.2-1.4-fold, 1.4-1.6-fold, 1.6-1.8-fold, 1.8-2-fold, or two-fold more 5-FC than unmodified bacteria of the same bacterial subtype under the same conditions. In yet another embodiment, the genetically engineered bacteria consume about three-fold, four-fold, five-fold, six-fold, seven-fold, eight-fold, nine-fold, ten-fold, fifteen-fold, twenty-fold, thirty-fold, forty-fold, fifty-fold, hundred-fold, five hundred-fold, or one-thousand-fold more 5FC than unmodified bacteria of the same bacterial subtype under the same conditions.

[0915] In any of these 5-FC to 5-FU conversion and arginine production embodiments, the genetically engineered bacteria consume 0% to 2%, 2% to 4%, 4% to 6%,6% to 8%, 8% to 10%, 10% to 12%, 12% to 14%, 14% to 16%, 16% to 18%, 18% to 20%, 20% to 25%,25% to 30%, 30% to 35%, 35% to 40%,40% to 45% 45% to 50%, 50% to 55%, 55% to 60%, 60% to 65%, 65% to 70% to 80%, 80% to 90%, or 90% to 100% more glutamate than unmodified bacteria of the same bacterial subtype under the same conditions. In yet another embodiment, the genetically engineered bacteria consume 1.0-1.2-fold, 1.2-1.4-fold, 1.4-1.6-fold, 1.6-1.8-fold, 1.8-2-fold, or two-fold more glutamate than unmodified bacteria of the same bacterial subtype under the same conditions. In yet another embodiment, the genetically engineered bacteria consume about three-fold, four-fold, five-fold, six-fold, seven-fold, eight-fold, nine-fold, ten-fold, fifteen-fold, twenty-fold, thirty-fold, forty-fold, fifty-fold, hundred-fold, five hundred-fold, or one-thousand-fold more glutamate than unmodified bacteria of the same bacterial subtype under the same conditions.

[0916] In any of these 5-FC to 5-FU conversion and arginine production embodiments, the genetically engineered bacteria are capable of reducing cell proliferation by at least about 10% to 20%, 20% to 25%, 25% to 30%, 30% to 40%, 40% to 50%, 50% to 60%, 60% to 70%, 70% to 75%, 75% to 80%, 80% to 85%, 85% to 90%, 90% to 95%, 95% to 99%, or more as compared to an unmodified bacteria of the same subtype under the same conditions. In any of these 5-FC to 5-FU conversion and arginine production embodiments, the genetically engineered bacteria are capable of reducing tumor growth by at least about 10% to 20%, 20% to 25%, 25% to 30%, 30% to 40%, 40% to 50%, 50% to 60%, 60% to 70%, 70% to 75%, 75% to 80%, 80% to 85%, 85% to 90%, 90% to 95%, 95% to 99%, or more as compared to an unmodified bacteria of the same subtype under the same conditions. In any of these 5-FC to 5-FU conversion and arginine production embodiments, the genetically engineered bacteria are capable of reducing tumor size by at least about 10% to 20%, 20% to 25%, 25% to 30%, 30% to 40%, 40% to 50%, 50% to 60%, 60% to 70%, 70% to 75%, 75% to 80%, 80% to 85%, 85% to 90%, 90% to 95%, 95% to 99%, or more as compared to an unmodified bacteria of the same subtype under the same conditions. In any of these 5-FC to 5-FU conversion and arginine production embodiments, the genetically engineered bacteria are capable of reducing tumor volume by at least about 10% to 20%, 20% to 25%, 25% to 30%, 30% to 40%, 40% to 50%, 50% to 60%, 60% to 70%, 70% to 75%, 75% to 80%, 80% to 85%, 85% to 90%, 90% to 95%, 95% to 99%, or more as compared to an unmodified bacteria of the same subtype under the same conditions. In any of these 5-FC to 5-FU conversion and arginine production embodiments, the genetically engineered bacteria are capable of reducing tumor weight by at least about 10% to 20%, 20% to 25%, 25% to 30%, 30% to 40%, 40% to 50%, 50% to 60%, 60% to 70%, 70% to 75%, 75% to 80%, 80% to 85%, 85% to 90%, 90% to 95%, 95% to 99%, or more as compared to an unmodified bacteria of the same subtype under the same conditions.

[0917] In any of these embodiments combining immune activation and priming with immune augmentation, the gene sequence(s) encoding effectors for targeting immune activation and priming and the gene sequence(s) encoding effectors for immune augmentation may be operably linked to one or more directly or indirectly inducible promoter(s). In some embodiments, the two or more gene sequence(s) are operably linked to a directly or indirectly inducible promoter that is induced under exogeneous environmental conditions, e.g., conditions found in the gut, the tumor microenvironment or other tissue specific conditions. In some embodiments, the two or more gene sequence(s) are operably linked to a directly or indirectly inducible promoter that is induced by metabolites found in the gut, the tumor microenvironment or other specific conditions. In some embodiments, the two or more gene sequence(s) are operably linked to a directly or indirectly inducible promoter that is induced under low-oxygen or anaerobic conditions. In some embodiments, the two or more gene sequence(s) are operably linked to a directly or indirectly inducible promoter that is induced under inflammatory conditions (e.g., RNS, ROS), as described herein. In some embodiments, the two or more gene sequence(s) are operably linked to a directly or indirectly inducible promoter that is induced under immunosuppressive conditions, e.g., as found in the tumor, as described herein. In some embodiments, the two or more gene sequence(s) are linked to a directly or indirectly inducible promoter that is induced by exposure a chemical or nutritional inducer, which may or may not be present under in vivo conditions and which may be present during in vitro conditions (such as strain culture, expansion, manufacture), such as tetracycline or arabinose, cumate, and salicylate, or others described herein. In some embodiments, the two or more payloads are all linked to a constitutive promoter. Suitable constitutive promoters are described herein. In some embodiments, the two or more gene sequence are operably linked to the same promoter sequences. In some embodiments, the two or more gene sequence are operably linked to two or more different promoter sequences, which can either all be constitutive (same or different constitutive promoters), all inducible (by same or different inducers), or a mix of constitutive and inducible promoters.

[0918] In any of the above immune activation and immune augmentation combination embodiments, the gene sequence(s) for producing the one or more immune activation and immune augmentation effectors may be present on a chromosome in the bacterium. In any of the above combination embodiments, the gene sequence(s) for producing the one or more immune activation and immune augmentation effectors may be present on a plasmid in the bacterium. In any of the above combination embodiments, the gene sequence(s) for producing the one or more immune activation and immune augmentation effectors may be present both on a plasmid and the chromosome in the bacterium. In any of the above combination embodiments, the bacterium may be an auxotroph comprising a deletion or mutation in a gene required for cell survival and/or growth, e.g., wherein the gene is selected from thyA, dapD, and dapA. In any of the above combination embodiment, the genetically engineered bacterium may comprise a kill switch.

[0919] In some immune initiator and sustainer combinations and/or compositions, the genetically engineered microorganisms are capable of expressing any one or more of the described immune initiator circuits and immune sustainer circuits for the in low-oxygen conditions, and/or in the presence of cancer and/or the tumor microenvironment, or tissue specific molecules or metabolites, and/or in the presence of molecules or metabolites associated with inflammation or immune suppression, and/or in the presence of metabolites that may be present in the gut, and/or in the presence of metabolites that may or may not be present in vivo, and may be present in vitro during strain culture, expansion, production and/or manufacture, such as arabinose, cumate, and salicylate and others described herein. In some embodiments such an inducer may be administered in vivo to induce effector gene expression. In some immune initiator and sustainer combinations and/or compositions, the gene sequences(s) encoding circuitry for immune initiators and immune sustainers are controlled by a promoter inducible by such conditions and/or inducers. In some embodiments, the gene sequences(s) are controlled by a constitutive promoter, as described herein. In some embodiments, the gene sequences(s) are controlled by a constitutive promoter, and are expressed in in vivo conditions and/or in vitro conditions, e.g., during expansion, production and/or manufacture, as described herein.

[0920] In any of these immune initiator and sustainer combinations and/or compositions, any one or more of the immune initiator circuits and immune sustainer circuits are present on one or more plasmids (e.g., high copy or low copy) or are integrated into one or more sites in the microorganismal chromosome. Also, in some embodiments, the genetically engineered microorganisms are further capable of expressing any one or more of the described circuits and further comprise one or more of the following: (1) one or more auxotrophies, such as any auxotrophies known in the art and provided herein, e.g., thyA and/or dapA auxotrophy, (2) one or more kill switch circuits, such as any of the kill-switches described herein or otherwise known in the art, (3) one or more antibiotic resistance circuits, (4) one or more transporters for importing biological molecules or substrates, such any of the transporters described herein or otherwise known in the art, (5) one or more secretion circuits, such as any of the secretion circuits described herein and otherwise known in the art, (6) one or more surface display circuits, such as any of the surface display circuits described herein and otherwise known in the art and (7) one or more circuits for the production or degradation of one or more metabolites (e.g., kynurenine, tryptophan, adenosine, arginine) described herein (8) combinations of one or more of such additional circuits. In any of these embodiments, the bacteria genetically engineered to consume adenosine and kynurenine may be administered alone or in combination with one or more immune checkpoint inhibitors described herein, including but not limited anti-CTLA4, anti-PD1, or anti-PD-L1 antibodies.

[0921] In any of these embodiments, in which a microorganism genetically engineered to express one or more immune initiator circuit(s) and immune sustainer circuit(s), the microorganism may first produce higher levels of immune stimulator and at a later time produce immune sustainer. In any of these immune initiator/sustainer embodiments, expression of the immune initiator may be induced by an inducer. In any of these immune initiator/sustainer embodiments, immune sustainer may be induced by an inducer. In any of these immune initiator/sustainer embodiments, both immune initiator and immune sustainer may be induced by one or more inducer(s). A first inducer (inducing immune stimulator expression) and a second inducer (inducing immune sustainer expression) may be the same or different inducers. In any of these immune initiator/sustainer embodiments, the first inducer and second inducer may be administered sequentially or concurrently. Non-limiting examples of inducers include in vivo conditions, e.g., conditions of the gut or the tumor microenvironment (e.g., low oxygen, certain nutrients, etc.), conditions during cell culture or in vitro growth, or chemical inducers (e.g., arabinose, cumate, and salicylate, IPTG or other chemical inducers described herein), which can be employed in vitro or in vivo. In any of these immune initiator/sustainer embodiments, both immune initiator and immune sustainer may be controlled by or directly or indirectly linked to constitutive promoters, including but not limited to those described herein. In any of these immune initiator/sustainer embodiments, the immune initiator may be controlled by or directly or indirectly linked to an inducible promoter and immune sustainer may be controlled by or directly or indirectly linked to a constitutive promoter. In any of these immune initiator/sustainer embodiments, the immune initiator may be controlled by or directly or indirectly linked to an constitutive promoter and the immune sustainer may be controlled by or directly or indirectly linked to an inducible promoter.

[0922] In any of these immune initiator/sustainer embodiments, a bacterial strain expressing circuitry for immune initiation may be administered in conjunction with a separate bacterial strain expressing circuitry for immune sustenance. For example, one or more strain(s) of genetically engineered bacteria expressing immune initiatory circuitry and one or more separate strains of genetically engineered bacteria expressing immune sustainer circuitry may be administered sequentially, e.g., immune stimulator may be administered before immune sustainer. In another example, the immune initiator strain may be administered after the immune sustainer strain. In yet another example, the immune initiator strain may be administered concurrently with the immune sustainer strain.

[0923] In any of these immune initiator/sustainer embodiments, regardless of the sequence or timing of the administration (concurrent or sequential), engineered strains may express the circuitry for the immune sustainer sequentially or concurrently upon administration, i.e., timing and levels of expression are tuned using one or more mechanisms described herein, including but not limited to promoters and ribosome binding sites.

### Combinations of Metabolic Circuits

### Adenosine and Kynurenine Consumption

[0924] In some embodiments, the genetically engineered bacteria comprise circuitry that produces and/or consumes one or more metabolites. Alternatively, the disclosure provides a composition comprising a combination (e.g., two or more) of different genetically engineered bacteria, each bacteria encoding one or more enzymes for the production and/or consumption of one or more metabolic substrates. Such distinct or different bacterial strains can be administered concurrently or sequentially. Non-limiting examples of such substrates include kynurenine, tryptophan, adenosine and arginine.

[0925] Each combination of circuits, effectors, or immune modulators described herein can either be provided as combination circuitry in one bacterial strain or alternatively in two or more different or separate bacterial strains each expressing one or more circuits of the combination. For example, one or more genetically engineered bacteria comprising circuitry for the consumption of kynurenine and gene circuitry for the production arginine can be provided in one strain comprising both circuits or in two or more strains, each comprising at least one of the circuits.

[0926] In some embodiments, the genetically engineered bacteria comprise circuitry for the degradation of adenosine and the consumption of kynurenine. In one embodiment, the genetically engineered bacteria comprise gene sequences encoding kynureninase in combination with an adenosine degradation pathway. In one embodiment, the kynureninase is from Pseudomonas fluorescens. In one specific embodiment, the kynureninase from Pseudomonas fluorescens is chromosomally integrated and under control of a constitutive promoter. In one embodiment, the gene sequences encoding the adenosine degradation pathway enzymes comprise one or more genes selected from xdhA, xdhB, xdhC, add, xapA, deoD, and nupC. In one embodiment, the gene sequences encoding the adenosine degradation pathway comprise xdhA, xdhB, xdhC, add, xapA, deoD, and nupC. In one embodiment, the adenosine pathway enzymes are from E. coli. In one specific embodiment, the kynureninase is from Pseudomonas fluorescens and the gene sequences encoding the adenosine degradation pathway comprise xdhA, xdhB, xdhC, add, xapA, deoD, and nupC, e.g., from E. coli. In on specific embodiment, the adenosine pathway enzymes are integrated into the chromosome and are under the control of a low-oxygen promoter, e.g., FNR. In any of these embodiments, TrpE may be deleted.

[0927] In alternate embodiments, the disclosure provides a composition comprising a combination (e.g., two or more) of different genetically engineered bacteria, each bacteria encoding a different immune modulator. Accordingly, in some embodiments, the composition comprises genetically engineered bacteria comprising circuitry for the degradation of adenosine and genetically engineered bacteria the consumption of kynurenine. In one embodiment, the composition comprises genetically engineered bacteria comprising gene sequences encoding kynureninase in combination with genetically engineered bacteria comprising gene sequences encoding an adenosine degradation pathway. In any of these embodiments, TrpE may be deleted.

[0928] In one embodiment, the kynureninase is from Pseudomonas fluorescens. In one specific embodiment, the kynureninase from Pseudomonas fluorescens is chromosomally integrated and under control of a constitutive promoter. In one embodiment, the gene sequences encoding the adenosine degradation pathway enzymes comprise one or more genes selected from xdhA, xdhB, xdhC, add, xapA, deoD, and nupC. In one embodiment, the gene sequences encoding the adenosine degradation pathway comprise xdhA, xdhB, xdhC, add, xapA, deoD, and nupC. In one embodiment, the adenosine pathway enzymes are from E. coli. In one specific embodiment, the kynureninase is from Pseudomonas fluorescens and the gene sequences encoding the adenosine degradation pathway comprise xdhA, xdhB, xdhC, add, xapA, deoD, and nupC, e.g., from E. coli. In on specific embodiment, the adenosine pathway enzymes are integrated into the chromosome and are under the control of a low-oxygen promoter, e.g., FNR. In any of these embodiments, TrpE may be deleted.

[0929] In any of these adenosine and kynurenine consumption embodiments, the bacteria genetically engineered to consume adenosine and kynurenine consume 0% to 2% to 4%, 4% to 6%,6% to 8%, 8% to 10%, 10% to 12%, 12% to 14%, 14% to 16%, 16% to 18%, 18% to 20%, 20% to 25%,25% to 30%, 30% to 35%, 35% to 40%,40% to 45% 45% to 50%, 50% to 55%, 55% to 60%, 60% to 65%, 65% to 70% to 80%, 80% to 90%, or 90% to 100% more adenosine than unmodified bacteria of the same bacterial subtype under the same conditions. In yet another embodiment, the bacteria genetically engineered to consume adenosine and kynurenine consume 1.0-1.2-fold, 1.2-1.4-fold, 1.4-1.6-fold, 1.6-1.8-fold, 1.8-2-fold, or two-fold more adenosine than unmodified bacteria of the same bacterial subtype under the same conditions. In yet another embodiment, bacteria genetically engineered to consume adenosine and kynurenine consume about three-fold, four-fold, five-fold, six-fold, seven-fold, eight-fold, nine-fold, ten-fold, fifteen-fold, twenty-fold, thirty-fold, forty-fold, fifty-fold, hundred-fold, five hundred-fold, or one-thousand-fold more adenosine than unmodified bacteria of the same bacterial subtype under the same conditions.

[0930] In any of these adenosine and kynurenine consumption embodiments, the bacteria genetically engineered to consume adenosine and kynurenine produce at least about 0% to 2% to 4%, 4% to 6%,6% to 8%, 8% to 10%, 10% to 12%, 12% to 14%, 14% to 16%, 16% to 18%, 18% to 20%, 20% to 25%,25% to 30%, 30% to 35%, 35% to 40%,40% to 45% 45% to 50%, 50% to 55%, 55% to 60%, 60% to 65%, 65% to 70% to 80%, 80% to 90%, or 90% to 100% more urate than unmodified bacteria of the same bacterial subtype under the same conditions. In yet another embodiment, the bacteria genetically engineered to consume adenosine and kynurenine produce at least about 1.0-1.2-fold, 1.2-1.4-fold, 1.4-1.6-fold, 1.6-1.8-fold, 1.8-2-fold, or two-fold more urate than unmodified bacteria of the same bacterial subtype under the same conditions. In yet another embodiment, the bacteria genetically engineered to consume adenosine and kynurenine produce about three-fold, four-fold, five-fold, six-fold, seven-fold, eight-fold, nine-fold, ten-fold, fifteen-fold, twenty-fold, thirty-fold, forty-fold, or fifty-fold, hundred-fold, five hundred-fold, or one-thousand-fold more urate than unmodified bacteria of the same bacterial subtype under the same conditions.

[0931] In any of these adenosine and kynurenine consumption embodiments, the bacteria genetically engineered to consume adenosine and kynurenine increase the adenosine degradation rate by 0% to 2% to 4%, 4% to 6%,6% to 8%, 8% to 10%, 10% to 12%, 12% to 14%, 14% to 16%, 16% to 18%, 18% to 20%, 20% to 25%,25% to 30%, 30% to 35%, 35% to 40%,40% to 45% 45% to 50%, 50% to 55%, 55% to 60%, 60% to 65%, 65% to 70% to 80%, 80% to 90%, or 90% to 100% relative to unmodified bacteria of the same bacterial subtype under the same conditions. In yet another embodiment, the bacteria genetically engineered to consume adenosine and kynurenine increase the adenosine degradation rate by 1.0-1.2-fold, 1.2-1.4-fold, 1.4-1.6-fold, 1.6-1.8-fold, 1.8-2-fold, or two-fold more relative to unmodified bacteria of the same bacterial subtype under the same conditions. In yet another embodiment, the bacteria genetically engineered to consume adenosine and kynurenine increase the degradation rate by about three-fold, four-fold, five-fold, six-fold, seven-fold, eight-fold, nine-fold, ten-fold, fifteen-fold, twenty-fold, thirty-fold, forty-fold, or fifty-fold, hundred-fold, five hundred-fold, or one-thousand-fold relative to unmodified bacteria of the same bacterial subtype under the same conditions.

[0932] In any of these adenosine and kynurenine consumption embodiments, the bacteria genetically engineered to consume adenosine and kynurenine may have an adenosine degradation rate of about 1.8-10 umol/hr/10\hat{ }9 cells when induced under low oxygen conditions. In one specific embodiment, the bacteria genetically engineered to consume adenosine and kynurenine have an adenosine degradation rate of about 5-9 umol/hr/10\hat{ }9 cells. In one specific embodiment, the bacteria genetically engineered to consume adenosine and kynurenine have an adenosine degradation rate of about 6-8 umol/hr/10\hat{ }9 cells.

[0933] In any of these adenosine and kynurenine consumption embodiments, the bacteria genetically engineered to consume adenosine and kynurenine may increase the adenosine degradation by about 50% to 70% relative to unmodified bacteria of the same bacterial subtype under the same conditions, i.e., when induced under low oxygen conditions, after 1 hour. In one embodiment, the bacteria genetically engineered to consume adenosine and kynurenine increase the adenosine degradation by about 55% to 65% relative to unmodified bacteria of the same bacterial subtype under the same conditions, i.e., when induced under low oxygen conditions after 1 hour. In one specific embodiment, the bacteria genetically engineered to consume adenosine and kynurenine increase the adenosine degradation by about 55% to 60% relative to unmodified bacteria of the same bacterial subtype under the same conditions, i.e., when induced under low oxygen conditions, after 1 hour. In yet another embodiment, the bacteria genetically engineered to consume adenosine and kynurenine increase the adenosine degradation by about 1.5-3 fold when induced under low oxygen conditions, after 1 hour. In one specific embodiment, the bacteria genetically engineered to consume adenosine and kynurenine increase the adenosine degradation by about 2-2.5 fold when induced under low oxygen conditions, after 1 hour.

[0934] In one adenosine and kynurenine consumption embodiment, the bacteria increase the adenosine degradation by about 85% to 100% relative to unmodified bacteria of the same bacterial subtype under the same conditions, i.e., when induced under low oxygen conditions, after 2 hours. In one embodiment, the bacteria genetically engineered to consume adenosine and kynurenine increase the adenosine degradation by about 95% to 100% relative to unmodified bacteria of the same bacterial subtype under the same conditions, i.e., when induced under low oxygen conditions after 2 hours. In one specific embodiment, the bacteria genetically engineered to consume adenosine and kynurenine increase the adenosine degradation by about 97% to 99% relative to unmodified bacteria of the same bacterial subtype under the same conditions, i.e., when induced under low oxygen conditions, after 2 hours.

[0935] In one adenosine and kynurenine consumption embodiment, the bacteria genetically engineered to consume adenosine and kynurenine may increase the adenosine degradation by about 40-50 fold when induced under low oxygen conditions, after 2 hours. In one specific embodiment, the bacteria genetically engineered to consume adenosine and kynurenine increase the adenosine degradation by about 44-48 fold when induced under low oxygen conditions, after 2 hours.

[0936] In one adenosine and kynurenine consumption embodiment, the bacteria genetically engineered to consume adenosine and kynurenine increase the adenosine degradation by about 95% to 100% relative to unmodified bacteria of the same bacterial subtype under the same conditions, i.e., when induced under low oxygen conditions, after 3 hours. In one embodiment, the bacteria genetically engineered to consume adenosine and kynurenine increase the adenosine degradation by about 98% to 100% relative to unmodified bacteria of the same bacterial subtype under the same conditions, i.e., when induced under low oxygen conditions after 3 hours. In one specific embodiment, the bacteria genetically engineered to consume adenosine and kynurenine increase the adenosine degradation by about 99% to 99% relative to unmodified bacteria of the same bacterial subtype under the same conditions, i.e., when induced under low oxygen conditions, after 3 hours. In yet another embodiment, the bacteria genetically engineered to consume adenosine and kynurenine increase the adenosine degradation by about 100-1000 fold when induced under low oxygen conditions, after 3 hours. In yet another embodiment, the bacteria genetically engineered to consume adenosine and kynurenine increase the adenosine degradation by about 1000-10000 fold when induced under low oxygen conditions, after 3 hours.

[0937] In one adenosine and kynurenine consumption embodiment, the bacteria genetically engineered to consume adenosine and kynurenine increase the adenosine degradation by about 95% to 100% relative to unmodified bacteria of the same bacterial subtype under the same conditions, i.e., when induced under low oxygen conditions, after 4 hours. In one embodiment, the bacteria genetically engineered to consume adenosine and kynurenine increase the adenosine degradation by about 98% to 100% relative to unmodified bacteria of the same bacterial subtype under the same conditions, i.e., when induced under low oxygen conditions after 4 hours. In one embodiment, the bacteria genetically engineered to consume adenosine and kynurenine increase the adenosine degradation by about 99% to 99% relative to unmodified bacteria of the same bacterial subtype under the same conditions, i.e., when induced under low oxygen conditions, after 4 hours. In yet another embodiment, the bacteria genetically engineered to consume adenosine and kynurenine increase the adenosine degradation by about 100-1000 fold when induced under low oxygen conditions, after 4 hours. In yet another embodiment, the bacteria genetically engineered to consume adenosine and kynurenine increase the adenosine degradation by about 1000-10000 fold when induced under low oxygen conditions, after 4 hours.

[0938] In any of these adenosine and kynurenine consumption embodiments, the bacteria consume 0% to 2% to 4%, 4% to 6%,6% to 8%, 8% to 10%, 10% to 12%, 12% to 14%, 14% to 16%, 16% to 18%, 18% to 20%, 20% to 25%,25% to 30%, 30% to 35%, 35% to 40%,40% to 45% 45% to 50%, 50% to 55%, 55% to 60%, 60% to 65%, 65% to 70% to 80%, 80% to 90%, or 90% to 100% more kynurenine than unmodified bacteria of the same bacterial subtype under the same conditions. In yet another embodiment, the genetically engineered bacteria consume 1.0-1.2-fold, 1.2-1.4-fold, 1.4-1.6-fold, 1.6-1.8-fold, 1.8-2-fold, or two-fold more kynurenine than unmodified bacteria of the same bacterial subtype under the same conditions. In yet another embodiment, the genetically engineered bacteria consume about three-fold, four-fold, about three-fold, four-fold, five-fold, six-fold, seven-fold, eight-fold, nine-fold, ten-fold, fifteen-fold, twenty-fold, thirty-fold, forty-fold, fifty-fold, hundred-fold, five hundred-fold, or one-thousand-fold more kynurenine than unmodified bacteria of the same bacterial subtype under the same conditions.

[0939] In any of these adenosine and kynurenine consumption embodiments, the bacteria genetically engineered to consume kynurenine and optionally produce tryptophan produce at least about 0% to 2% to 4%, 4% to 6%,6% to 8%, 8% to 10%, 10% to 12%, 12% to 14%, 14% to 16%, 16% to 18%, 18% to 20%, 20% to 25%,25% to 30%, 30% to 35%, 35% to 40%,40% to 45% 45% to 50%, 50% to 55%, 55% to 60%, 60% to 65%, 65% to 70% to 80%, 80% to 90%, or 90% to 100% more tryptophan than unmodified bacteria of the same bacterial subtype under the same conditions. In yet another embodiment, the genetically engineered bacteria produce at least about 1.0-1.2-fold, 1.2-1.4-fold, 1.4-1.6-fold, 1.6-1.8-fold, 1.8-2-fold, or two-fold more tryptophan than unmodified bacteria of the same bacterial subtype under the same conditions. In yet another embodiment, the genetically engineered bacteria produce about three-fold, four-fold, five-fold, six-fold, seven-fold, eight-fold, nine-fold, ten-fold, fifteen-fold, twenty-fold, thirty-fold, forty-fold, or fifty-fold, hundred-fold, five hundred-fold, or one-thousand-fold more tryptophan than unmodified bacteria of the same bacterial subtype under the same conditions.

[0940] In any of these adenosine and kynurenine consumption embodiments, the genetically engineered bacteria increase the kynurenine consumption rate by 0% to 2% to 4%, 4% to 6%,6% to 8%, 8% to 10%, 10% to 12%, 12% to 14%, 14% to 16%, 16% to 18%, 18% to 20%, 20% to 25%,25% to 30%, 30% to 35%, 35% to 40%,40% to 45% 45% to 50%, 50% to 55%, 55% to 60%, 60% to 65%, 65% to 70% to 80%, 80% to 90%, or 90% to 100% relative to unmodified bacteria of the same bacterial subtype under the same conditions. In yet another adenosine and kynurenine consumption embodiment, the genetically engineered bacteria increase the kynurenine consumption rate by 1.0-1.2-fold, 1.2-1.4-fold, 1.4-1.6-fold, 1.6-1.8-fold, 1.8-2-fold, or two-fold more relative to unmodified bacteria of the same bacterial subtype under the same conditions. In yet another embodiment, the genetically engineered bacteria increase the kynurenine consumption rate by about three-fold, four-fold, five-fold, six-fold, seven-fold, eight-fold, nine-fold, ten-fold, fifteen-fold, twenty-fold, thirty-fold, forty-fold, or fifty-fold, hundred-fold, five hundred-fold, or one-thousand-fold relative to unmodified bacteria of the same bacterial subtype under the same conditions.

[0941] In one adenosine and kynurenine consumption embodiment, the genetically engineered bacteria increase the kynurenine consumption by about 80% to 100% relative to unmodified bacteria of the same bacterial subtype under the same conditions, after 4 hours. In one adenosine and kynurenine consumption embodiment, the genetically engineered bacteria increase the kynurenine consumption by about 90% to 100% relative to unmodified bacteria of the same bacterial subtype under the same conditions after 4 hours. In one specific adenosine and kynurenine consumption embodiment, the genetically engineered bacteria increase the kynurenine consumption by about 95% to 100% relative to unmodified bacteria of the same bacterial subtype under the same conditions, after 4 hours. In one specific embodiment, the genetically engineered bacteria increase the kynurenine consumption by about 99% to 100% relative to unmodified bacteria of the same bacterial subtype under the same conditions, after 4 hours. In yet another embodiment, the genetically engineered bacteria increase the kynurenine consumption by about 10-50 fold after 4 hours. In yet another embodiment, the genetically engineered bacteria increase the kynurenine consumption by about 50-100 fold after 4 hours. In yet another embodiment, the genetically engineered bacteria increase the kynurenine consumption by about 100-500 fold after 4 hours. In yet another embodiment, the genetically engineered bacteria increase the kynurenine consumption by about 500-1000 fold after 4 hours. In yet another embodiment, the genetically engineered bacteria increase the kynurenine consumption by about 1000-5000 fold after 4 hours. In yet another embodiment, the genetically engineered bacteria increase the kynurenine consumption by about 5000-10000 fold after 4 hours. In yet another embodiment, the genetically engineered bacteria increase the kynurenine consumption by about 10000-1000 fold after 4 hours.

[0942] In any of these adenosine and kynurenine consumption embodiments, the genetically engineered bacteria are capable of reducing cell proliferation by at least about 10% to 20%, 20% to 25%, 25% to 30%, 30% to 40%, 40% to 50%, 50% to 60%, 60% to 70%, 70% to 75%, 75% to 80%, 80% to 85%, 85% to 90%, 90% to 95%, 95% to 99%, or more as compared to an unmodified bacteria of the same subtype under the same conditions. In any of these adenosine and kynurenine consumption embodiments, the genetically engineered bacteria are capable of reducing tumor growth by at least about 10% to 20%, 20% to 25%, 25% to 30%, 30% to 40%, 40% to 50%, 50% to 60%, 60% to 70%, 70% to 75%, 75% to 80%, 80% to 85%, 85% to 90%, 90% to 95%, 95% to 99%, or more as compared to an unmodified bacteria of the same subtype under the same conditions. In any of these adenosine and kynurenine consumption embodiments, the genetically engineered bacteria are capable of reducing tumor size by at least about 10% to 20%, 20% to 25%, 25% to 30%, 30% to 40%, 40% to 50%, 50% to 60%, 60% to 70%, 70% to 75%, 75% to 80%, 80% to 85%, 85% to 90%, 90% to 95%, 95% to 99%, or more as compared to an unmodified bacteria of the same subtype under the same conditions. In any of these adenosine and kynurenine consumption embodiments, the genetically engineered bacteria are capable of reducing tumor volume by at least about 10% to 20%, 20% to 25%, 25% to 30%, 30% to 40%, 40% to 50%, 50% to 60%, 60% to 70%, 70% to 75%, 75% to 80%, 80% to 85%, 85% to 90%, 90% to 95%, 95% to 99%, or more as compared to an unmodified bacteria of the same subtype under the same conditions. In any of these adenosine and kynurenine consumption embodiments, the genetically engineered bacteria are capable of reducing tumor weight by at least about 10% to 20%, 20% to 25%, 25% to 30%, 30% to 40%, 40% to 50%, 50% to 60%, 60% to 70%, 70% to 75%, 75% to 80%, 80% to 85%, 85% to 90%, 90% to 95%, 95% to 99%, or more as compared to an unmodified bacteria of the same subtype under the same conditions.

[0943] In some adenosine and kynurenine consumption embodiments, the genetically engineered microorganisms are capable of expressing any one or more of the described circuits for the degradation of adenosine and kynurenine in low-oxygen conditions, and/or in the presence of cancer and/or the tumor microenvironment, or tissue specific molecules or metabolites, and/or in the presence of molecules or metabolites associated with inflammation or immune suppression, and/or in the presence of metabolites that may be present in the gut, and/or in the presence of metabolites that may or may not be present in vivo, and may be present in vitro during strain culture, expansion, production and/or manufacture, such as arabinose, cumate, and salicylate and others described herein. In some embodiments such an inducer may be administered in vivo to induce effector gene expression. In some embodiments, the gene sequences(s) encoding circuitry for the degradation of adenosine and/or kynurenine are controlled by a promoter inducible by such conditions and/or inducers. In some embodiments, the gene sequences(s) are controlled by a constitutive promoter, as described herein. In some embodiments, the gene sequences(s) are controlled by a constitutive promoter, and are expressed in in vivo conditions and/or in vitro conditions, e.g., during expansion, production and/or manufacture, as described herein.

[0944] In any of these adenosine and kynurenine consumption embodiments, any one or more of the described adenosine degradation circuits and kynurenine consumption circuits are present on one or more plasmids (e.g., high copy or low copy) or are integrated into one or more sites in the microorganismal chromosome. Also, in some embodiments, the genetically engineered microorganisms are further capable of expressing any one or more of the described circuits and further comprise one or more of the following: (1) one or more auxotrophies, such as any auxotrophies known in the art and provided herein, e.g., thyA and/or dapA auxotrophy, (2) one or more kill switch circuits, such as any of the kill-switches described herein or otherwise known in the art, (3) one or more antibiotic resistance circuits, (4) one or more transporters for importing biological molecules or substrates, such any of the transporters described herein or otherwise known in the art, (5) one or more secretion circuits, such as any of the secretion circuits described herein and otherwise known in the art, (6) one or more surface display circuits, such as any of the surface display circuits described herein and otherwise known in the art and (7) one or more circuits for the production or degradation of one or more metabolites (e.g., kynurenine, tryptophan, adenosine, arginine) described herein (8) combinations of one or more of such additional circuits.

[0945] In any of these embodiments, the one or more bacteria genetically engineered to consume adenosine and kynurenine may be administered alone or in combination with one or more immune checkpoint inhibitors described herein, including but not limited to anti-CTLA4, anti-PD1, or anti-PD-L1 antibodies. In any of these embodiments, the one or more bacteria genetically engineered to consume adenosine and kynurenine may be genetically engineered to produce and secrete or display on their surface one or more immune checkpoint inhibitors described herein, including but not limited to anti-CTLA4, anti-PD1, or anti-PD-L1 antibodies.

[0946] In any of these embodiments, the one or more bacteria genetically engineered to consume adenosine and kynurenine may be administered alone or in combination with one or more immune stimulatory agonists described herein, e.g., agonistic antibodies, including but not limited to anti-OX40, anti-41BB, or anti-GITR antibodies. In any of these embodiments, the one or more bacteria genetically engineered to consume adenosine and kynurenine may be genetically engineered to produce and secrete or display on their surface one or more immune stimulatory agonists described herein, e.g., agonistic antibodies, including but not limited to anti-OX40, anti-41BB, or anti-GITR antibodies.

### Adenosine Consumption and Arginine Production

[0947] In some embodiments, the genetically engineered bacteria comprise circuitry for the degradation of adenosine and the production of arginine and/or consumption of ammonia. In one embodiment, the genetically engineered bacteria comprise gene sequences encoding an arginine production and/or ammonia consumption circuit in combination with an adenosine degradation pathway. In one embodiment, the gene sequences encoding the arginine production and/or ammonia consumption circuit comprise feedback resistant ArgA (ArgAfbr) and a deletion in the endogenous arginine operon repressor ArgR. In one embodiment, the ArgAfbr is from E. coli. In one specific embodiment, ArgAfbr is integrated into the chromosome and is under the control of a low-oxygen promoter, e.g., FNR.

[0948] In one embodiment, the gene sequences encoding the adenosine degradation pathway enzymes comprise one or more genes selected from xdhA, xdhB, xdhC, add, xapA, deoD, and nupC. In one embodiment, the gene sequences encoding the adenosine degradation pathway comprise xdhA, xdhB, xdhC, add, xapA, deoD, and nupC. In one embodiment, the adenosine pathway enzymes are from E. coli. In one specific embodiment, the feedback resistant ArgA (ArgAfbr) is from E. coli and the gene sequences encoding the adenosine degradation pathway comprise xdhA, xdhB, xdhC, add, xapA, deoD, and nupC, e.g., from E. coli. In on specific embodiment, the adenosine pathway enzymes are integrated into the chromosome and are under the control of a low-oxygen promoter, e.g., FNR.

[0949] In alternate embodiments, the disclosure provides a composition comprising a combination (e.g., two or more) of different genetically engineered bacteria, each bacteria encoding a different immune modulator. Accordingly, in some embodiments, the composition comprises genetically engineered bacteria comprising circuitry for the degradation of adenosine and genetically engineered bacteria comprising sequences for the production of arginine and/or ammonia consumption. In one embodiment, the composition comprises genetically engineered bacteria comprising gene sequences encoding feedback resistant ArgA (ArgAfbr) and a deletion in the endogenous arginine operon repressor ArgR in combination with genetically engineered bacteria comprising gene sequences encoding an adenosine degradation pathway.

[0950] In one composition embodiment, the ArgAfbr is from E. coli. In one specific embodiment, ArgAfbr is integrated into the chromosome and is under the control of a low-oxygen promoter, e.g., FNR. In one composition embodiment, the gene sequences encoding the adenosine degradation pathway enzymes comprise one or more genes selected from xdhA, xdhB, xdhC, add, xapA, deoD, and nupC. In one embodiment, the gene sequences encoding the adenosine degradation pathway comprise xdhA, xdhB, xdhC, add, xapA, deoD, and nupC. In one embodiment, the adenosine pathway enzymes are from E. coli. In one specific embodiment, the diadenylate cyclase is from Listeria monocytogenes and the gene sequences encoding the adenosine degradation pathway comprise xdhA, xdhB, xdhC, add, xapA, deoD, and nupC, e.g., from E. coli. In on specific embodiment, the adenosine pathway enzymes are integrated into the chromosome and are under the control of a low-oxygen promoter, e.g., FNR.

[0951] In any of these adenosine consumption and arginine production and/or ammonia consumption embodiments, the bacteria consume 0% to 2% to 4%, 4% to 6%,6% to 8%, 8% to 10%, 10% to 12%, 12% to 14%, 14% to 16%, 16% to 18%, 18% to 20%, 20% to 25%,25% to 30%, 30% to 35%, 35% to 40%,40% to 45% 45% to 50%, 50% to 55%, 55% to 60%, 60% to 65%, 65% to 70% to 80%, 80% to 90%, or 90% to 100% more adenosine than unmodified bacteria of the same bacterial subtype under the same conditions. In yet another embodiment, the bacteria consume 1.0-1.2-fold, 1.2-1.4-fold, 1.4-1.6-fold, 1.6-1.8-fold, 1.8-2-fold, or two-fold more adenosine than unmodified bacteria of the same bacterial subtype under the same conditions. In yet another embodiment, bacteria consume about three-fold, four-fold, five-fold, six-fold, seven-fold, eight-fold, nine-fold, ten-fold, fifteen-fold, twenty-fold, thirty-fold, forty-fold, fifty-fold, hundred-fold, five hundred-fold, or one-thousand-fold more adenosine than unmodified bacteria of the same bacterial subtype under the same conditions.

[0952] In any of these adenosine consumption and arginine production and/or ammonia consumption embodiments, the bacteria produce at least about 0% to 2% to 4%, 4% to 6%,6% to 8%, 8% to 10%, 10% to 12%, 12% to 14%, 14% to 16%, 16% to 18%, 18% to 20%, 20% to 25%,25% to 30%, 30% to 35%, 35% to 40%,40% to 45% 45% to 50%, 50% to 55%, 55% to 60%, 60% to 65%, 65% to 70% to 80%, 80% to 90%, or 90% to 100% more urate than unmodified bacteria of the same bacterial subtype under the same conditions. In yet another embodiment, the bacteria produce at least about 1.0-1.2-fold, 1.2-1.4-fold, 1.4-1.6-fold, 1.6-1.8-fold, 1.8-2-fold, or two-fold more urate than unmodified bacteria of the same bacterial subtype under the same conditions. In yet another embodiment, the bacteria produce about three-fold, four-fold, five-fold, six-fold, seven-fold, eight-fold, nine-fold, ten-fold, fifteen-fold, twenty-fold, thirty-fold, forty-fold, or fifty-fold, hundred-fold, five hundred-fold, or one-thousand-fold more urate than unmodified bacteria of the same bacterial subtype under the same conditions.

[0953] In any of these adenosine consumption and arginine production and/or ammonia consumption embodiments, the bacteria increase the adenosine degradation rate by 0% to 2% to 4%, 4% to 6%,6% to 8%, 8% to 10%, 10% to 12%, 12% to 14%, 14% to 16%, 16% to 18%, 18% to 20%, 20% to 25%,25% to 30%, 30% to 35%, 35% to 40%,40% to 45% 45% to 50%, 50% to 55%, 55% to 60%, 60% to 65%, 65% to 70% to 80%, 80% to 90%, or 90% to 100% relative to unmodified bacteria of the same bacterial subtype under the same conditions. In yet another embodiment, the bacteria increase the adenosine degradation rate by 1.0-1.2-fold, 1.2-1.4-fold, 1.4-1.6-fold, 1.6-1.8-fold, 1.8-2-fold, or two-fold more relative to unmodified bacteria of the same bacterial subtype under the same conditions. In yet another embodiment, the bacteria increase the degradation rate by about three-fold, four-fold, five-fold, six-fold, seven-fold, eight-fold, nine-fold, ten-fold, fifteen-fold, twenty-fold, thirty-fold, forty-fold, or fifty-fold, hundred-fold, five hundred-fold, or one-thousand-fold relative to unmodified bacteria of the same bacterial subtype under the same conditions.

[0954] In any of these adenosine consumption and arginine production and/or ammonia consumption embodiments, the bacteria may have an adenosine degradation rate of about 1.8-10 umol/hr/10\hat{ }9 cells when induced under low oxygen conditions. In one specific embodiment, the bacteria have an adenosine degradation rate of about 5-9 umol/hr/10\hat{ }9 cells. In one specific embodiment, the bacteria have an adenosine degradation rate of about 6-8 umol/hr/10\hat{ }9 cells.

[0955] In any of these adenosine consumption and arginine production and/or ammonia consumption embodiments, the bacteria may increase the adenosine degradation by about 50% to 70% relative to unmodified bacteria of the same bacterial subtype under the same conditions, i.e., when induced under low oxygen conditions, after 1 hour. In one embodiment, the bacteria increase the adenosine degradation by about 55% to 65% relative to unmodified bacteria of the same bacterial subtype under the same conditions, i.e., when induced under low oxygen conditions after 1 hour. In one specific embodiment, the bacteria increase the adenosine degradation by about 55% to 60% relative to unmodified bacteria of the same bacterial subtype under the same conditions, i.e., when induced under low oxygen conditions, after 1 hour. In yet another embodiment, the bacteria increase the adenosine degradation by about 1.5-3 fold when induced under low oxygen conditions, after 1 hour. In one specific embodiment, the bacteria increase the adenosine degradation by about 2-2.5 fold when induced under low oxygen conditions, after 1 hour.

[0956] In one adenosine consumption and arginine production and/or ammonia consumption embodiment, the bacteria increase the adenosine degradation by about 85% to 100% relative to unmodified bacteria of the same bacterial subtype under the same conditions, i.e., when induced under low oxygen conditions, after 2 hours. In one embodiment, the bacteria increase the adenosine degradation by about 95% to 100% relative to unmodified bacteria of the same bacterial subtype under the same conditions, i.e., when induced under low oxygen conditions after 2 hours. In one specific embodiment, the bacteria increase the adenosine degradation by about 97% to 99% relative to unmodified bacteria of the same bacterial subtype under the same conditions, i.e., when induced under low oxygen conditions, after 2 hours.

[0957] In one adenosine consumption and arginine production and/or ammonia consumption embodiment, the bacteria may increase the adenosine degradation by about 40-50 fold when induced under low oxygen conditions, after 2 hours. In one specific embodiment, the bacteria increase the adenosine degradation by about 44-48 fold when induced under low oxygen conditions, after 2 hours.

[0958] In one adenosine consumption and arginine production and/or ammonia consumption embodiment, the bacteria increase the adenosine degradation by about 95% to 100% relative to unmodified bacteria of the same bacterial subtype under the same conditions, i.e., when induced under low oxygen conditions, after 3 hours. In one embodiment, the bacteria increase the adenosine degradation by about 98% to 100% relative to unmodified bacteria of the same bacterial subtype under the same conditions, i.e., when induced under low oxygen conditions after 3 hours. In one specific embodiment, the bacteria increase the adenosine degradation by about 99% to 99% relative to unmodified bacteria of the same bacterial subtype under the same conditions, i.e., when induced under low oxygen conditions, after 3 hours. In yet another embodiment, the bacteria increase the adenosine degradation by about 100-1000 fold when induced under low oxygen conditions, after 3 hours. In yet another embodiment, the bacteria increase the adenosine degradation by about 1000-10000 fold when induced under low oxygen conditions, after 3 hours.

[0959] In one adenosine consumption and arginine production and/or ammonia consumption embodiment, the bacteria increase the adenosine degradation by about 95% to 100% relative to unmodified bacteria of the same bacterial subtype under the same conditions, i.e., when induced under low oxygen conditions, after 4 hours. In one embodiment, the bacteria increase the adenosine degradation by about 98% to 100% relative to unmodified bacteria of the same bacterial subtype under the same conditions, i.e., when induced under low oxygen conditions after 4 hours. In one embodiment, the bacteria increase the adenosine degradation by about 99% to 99% relative to unmodified bacteria of the same bacterial subtype under the same conditions, i.e., when induced under low oxygen conditions, after 4 hours. In yet another embodiment, the bacteria increase the adenosine degradation by about 100-1000 fold when induced under low oxygen conditions, after 4 hours. In yet another embodiment, the bacteria increase the adenosine degradation by about 1000-10000 fold when induced under low oxygen conditions, after 4 hours.

[0960] In any adenosine consumption and arginine production and/or ammonia consumption embodiments, the genetically engineered bacteria produce at least about 0% to 2%, 2% to 4%, 4% to 6%,6% to 8%, 8% to 10%, 10% to 12%, 12% to 14%, 14% to 16%, 16% to 18%, 18% to 20%, 20% to 25%,25% to 30%, 30% to 35%, 35% to 40%,40% to 45% 45% to 50%, 50% to 55%, 55% to 60%, 60% to 65%, 65% to 70% to 80%, 80% to 90%, or 90% to 100% more arginine than unmodified bacteria of the same bacterial subtype under the same conditions.

[0961] In yet another adenosine consumption and arginine production and/or ammonia consumption embodiment, the genetically engineered bacteria produce at least about 1.0-1.2-fold, 1.2-1.4-fold, 1.4-1.6-fold, 1.6-1.8-fold, 1.8-2-fold, or two-fold more arginine than unmodified bacteria of the same bacterial subtype under the same conditions. In yet another embodiment, the genetically engineered bacteria produce about three-fold, four-fold, five-fold, six-fold, seven-fold, eight-fold, nine-fold, ten-fold, fifteen-fold, twenty-fold, thirty-fold, forty-fold, or fifty-fold, hundred-fold, five hundred-fold, or one-thousand-fold more arginine than unmodified bacteria of the same bacterial subtype under the same conditions.

[0962] In any of these adenosine consumption and arginine production and/or ammonia consumption embodiments, the genetically engineered bacteria consume 0% to 2%, 2% to 4%, 4% to 6%,6% to 8%, 8% to 10%, 10% to 12%, 12% to 14%, 14% to 16%, 16% to 18%, 18% to 20%, 20% to 25%,25% to 30%, 30% to 35%, 35% to 40%,40% to 45% 45% to 50%, 50% to 55%, 55% to 60%, 60% to 65%, 65% to 70% to 80%, 80% to 90%, or 90% to 100% more glutamate than unmodified bacteria of the same bacterial subtype under the same conditions. In yet another embodiment, the genetically engineered bacteria consume 1.0-1.2-fold, 1.2-1.4-fold, 1.4-1.6-fold, 1.6-1.8-fold, 1.8-2-fold, or two-fold more glutamate than unmodified bacteria of the same bacterial subtype under the same conditions. In yet another embodiment, the genetically engineered bacteria consume about three-fold, four-fold, five-fold, six-fold, seven-fold, eight-fold, nine-fold, ten-fold, fifteen-fold, twenty-fold, thirty-fold, forty-fold, fifty-fold, hundred-fold, five hundred-fold, or one-thousand-fold more glutamate than unmodified bacteria of the same bacterial subtype under the same conditions.

[0963] In any of these adenosine consumption and arginine production and/or ammonia consumption embodiments, the genetically engineered bacteria consume 0% to 2%, 2% to 4%, 4% to 6%,6% to 8%, 8% to 10%, 10% to 12%, 12% to 14%, 14% to 16%, 16% to 18%, 18% to 20%, 20% to 25%,25% to 30%, 30% to 35%, 35% to 40%,40% to 45% 45% to 50%, 50% to 55%, 55% to 60%, 60% to 65%, 65% to 70% to 80%, 80% to 90%, or 90% to 100% more ammonia than unmodified bacteria of the same bacterial subtype under the same conditions. In yet another embodiment, the genetically engineered bacteria consume 1.0-1.2-fold, 1.2-1.4-fold, 1.4-1.6-fold, 1.6-1.8-fold, 1.8-2-fold, or two-fold more ammonia than unmodified bacteria of the same bacterial subtype under the same conditions. In yet another embodiment, the genetically engineered bacteria consume about three-fold, four-fold, five-fold, six-fold, seven-fold, eight-fold, nine-fold, ten-fold, fifteen-fold, twenty-fold, thirty-fold, forty-fold, fifty-fold, hundred-fold, five hundred-fold, or one-thousand-fold more ammonia than unmodified bacteria of the same bacterial subtype under the same conditions.

[0964] In any of these adenosine consumption and arginine production and/or ammonia consumption embodiments, the bacteria are capable of reducing cell proliferation by at least about 10% to 20%, 20% to 25%, 25% to 30%, 30% to 40%, 40% to 50%, 50% to 60%, 60% to 70%, 70% to 75%, 75% to 80%, 80% to 85%, 85% to 90%, 90% to 95%, 95% to 99%, or more as compared to an unmodified bacteria of the same subtype under the same conditions. In any of these embodiments, the bacteria are capable of reducing tumor growth by at least about 10% to 20%, 20% to 25%, 25% to 30%, 30% to 40%, 40% to 50%, 50% to 60%, 60% to 70%, 70% to 75%, 75% to 80%, 80% to 85%, 85% to 90%, 90% to 95%, 95% to 99%, or more as compared to an unmodified bacteria of the same subtype under the same conditions. In any of these embodiments, the bacteria are capable of reducing tumor size by at least about 10% to 20%, 20% to 25%, 25% to 30%, 30% to 40%, 40% to 50%, 50% to 60%, 60% to 70%, 70% to 75%, 75% to 80%, 80% to 85%, 85% to 90%, 90% to 95%, 95% to 99%, or more as compared to an unmodified bacteria of the same subtype under the same conditions. In any of these embodiments, the bacteria are capable of reducing tumor volume by at least about 10% to 20%, 20% to 25%, 25% to 30%, 30% to 40%, 40% to 50%, 50% to 60%, 60% to 70%, 70% to 75%, 75% to 80%, 80% to 85%, 85% to 90%, 90% to 95%, 95% to 99%, or more as compared to an unmodified bacteria of the same subtype under the same conditions. In any of these embodiments, the bacteria are capable of reducing tumor weight by at least about 10% to 20%, 20% to 25%, 25% to 30%, 30% to 40%, 40% to 50%, 50% to 60%, 60% to 70%, 70% to 75%, 75% to 80%, 80% to 85%, 85% to 90%, 90% to 95%, 95% to 99%, or more as compared to an unmodified bacteria of the same subtype under the same conditions.

[0965] In some adenosine consumption and arginine production and/or ammonia consumption embodiments, the genetically engineered microorganisms are capable of expressing any one or more of the described circuits for the degradation of adenosine and production of arginine in low-oxygen conditions, and/or in the presence of cancer and/or the tumor microenvironment, or tissue specific molecules or metabolites, and/or in the presence of molecules or metabolites associated with inflammation or immune suppression, and/or in the presence of metabolites that may be present in the gut, and/or in the presence of metabolites that may or may not be present in vivo, and may be present in vitro during strain culture, expansion, production and/or manufacture, such as arabinose, cumate, and salicylate and others described herein. In some embodiments such an inducer may be administered in vivo to induce effector gene expression. In some embodiments, the gene sequences(s) encoding circuitry for the degradation of adenosine and the production of arginine are controlled by a promoter inducible by such conditions and/or inducers. In some embodiments, the gene sequences(s) are controlled by a constitutive promoter, as described herein. In some embodiments, the gene sequences(s) are controlled by a constitutive promoter, and are expressed in in vivo conditions and/or in vitro conditions, e.g., during expansion, production and/or manufacture, as described herein.

[0966] In any of these adenosine consumption and arginine production and/or ammonia consumption embodiments, any one or more of the described adenosine degradation circuits and arginine production circuits are present on one or more plasmids (e.g., high copy or low copy) or are integrated into one or more sites in the microorganismal chromosome. Also, in some embodiments, the genetically engineered microorganisms are further capable of expressing any one or more of the described circuits and further comprise one or more of the following: (1) one or more auxotrophies, such as any auxotrophies known in the art and provided herein, e.g., thyA and/or dapA auxotrophy, (2) one or more kill switch circuits, such as any of the kill-switches described herein or otherwise known in the art, (3) one or more antibiotic resistance circuits, (4) one or more transporters for importing biological molecules or substrates, such any of the transporters described herein or otherwise known in the art, (5) one or more secretion circuits, such as any of the secretion circuits described herein and otherwise known in the art, (6) one or more surface display circuits, such as any of the surface display circuits described herein and otherwise known in the art and (7) one or more circuits for the production or degradation of one or more metabolites (e.g., kynurenine, tryptophan, adenosine, arginine) described herein (8) combinations of one or more of such additional circuits.

[0967] In any of these embodiments, the bacteria genetically engineered to consume adenosine and produce arginine and/or consume ammonia may be administered alone or in combination with one or more immune checkpoint inhibitors described herein, including but not limited anti-CTLA4, anti-PD1, or anti-PD-L1 antibodies. In any of these embodiments, the one or more bacteria genetically engineered consume adenosine and produce arginine and/or consume ammonia may be genetically engineered to produce and secrete or display on their surface one or more immune checkpoint inhibitors described herein, including but not limited to anti-CTLA4, anti-PD1, or anti-PD-L1 antibodies.

[0968] In any of these embodiments, the one or more bacteria genetically engineered consume adenosine and produce arginine and/or consume ammonia may be administered alone or in combination with one or more immune stimulatory agonists described herein, e.g., agonistic antibodies, including but not limited to anti-OX40, anti-41BB, or anti-GITR antibodies. In any of these embodiments, the one or more bacteria genetically engineered consume adenosine and produce arginine and/or consume ammonia may be genetically engineered to produce and secrete or display on their surface one or more immune stimulatory agonists described herein, e.g., agonistic antibodies, including but not limited to anti-OX40, anti-41BB, or anti-GITR antibodies.

### Kynurenine Consumption and Arginine Production

[0969] In some embodiments, the genetically engineered bacteria comprise circuitry for the consumption of kynurenine and the production of arginine and or consumption of ammonia. In one embodiment, the genetically engineered bacteria comprise gene sequences encoding an arginine production and/or ammonia consumption circuit in combination with a kynurenine consumption (and optionally tryptophan production) pathway. In one embodiment, the genetically engineered bacteria comprise gene sequences encoding kynureninase in combination with arginine production pathway. In one embodiment, the kynureninase is from Pseudomonas fluorescens. In one specific embodiment, the kynureninase from Pseudomonas fluorescens is chromosomally integrated and under control of a constitutive promoter. In one embodiment, the gene sequences encoding the arginine production and/or ammonia consumption circuit comprise feedback resistant ArgA (ArgAfbr) and a deletion in the endogenous arginine operon repressor ArgR. In one embodiment, the ArgAfbr is from E. coli. In one specific embodiment, ArgAfbr is integrated into the chromosome and is under the control of a low-oxygen promoter, e.g., FNR. In any of these embodiments, TrpE may be deleted.

[0970] In alternate embodiments, the disclosure provides a composition comprising a combination (e.g., two or more) of different genetically engineered bacteria, each bacteria encoding a different immune modulator. Accordingly, in some embodiments, the composition comprises genetically engineered bacteria comprising circuitry for the consumption of kynurenine and genetically engineered bacteria comprising circuitry for the production of arginine and or consumption of ammonia. In one embodiment, the composition comprises genetically engineered bacteria comprising gene sequences encoding an arginine production circuit in combination with genetically engineered bacteria comprising gene sequences encoding a kynurenine consumption (and optionally tryptophan production) pathway. In one embodiment, the composition comprises genetically engineered bacteria comprising gene sequences encoding kynureninase in combination with genetically engineered bacteria comprising gene sequences encoding an arginine production pathway. In one embodiment, the kynureninase is from Pseudomonas fluorescens. In one specific embodiment, the kynureninase from Pseudomonas fluorescens is chromosomally integrated and under control of a constitutive promoter. In one embodiment, the gene sequences encoding the arginine production and/or ammonia consumption circuit comprise feedback resistant ArgA (ArgAfbr) and a deletion in the endogenous arginine operon repressor ArgR. In one embodiment, the ArgAfbr is from E. coli. In one specific embodiment, ArgAfbr is integrated into the chromosome and is under the control of a low-oxygen promoter, e.g., FNR. In any of these embodiments, TrpE may be deleted.

[0971] In any of these kynurenine consumption and arginine production and/or ammonia consumption embodiments, the bacteria consume 0% to 2% to 4%, 4% to 6%,6% to 8%, 8% to 10%, 10% to 12%, 12% to 14%, 14% to 16%, 16% to 18%, 18% to 20%, 20% to 25%,25% to 30%, 30% to 35%, 35% to 40%,40% to 45% 45% to 50%, 50% to 55%, 55% to 60%, 60% to 65%, 65% to 70% to 80%, 80% to 90%, or 90% to 100% more kynurenine than unmodified bacteria of the same bacterial subtype under the same conditions. In yet another embodiment, the genetically engineered bacteria consume 1.0-1.2-fold, 1.2-1.4-fold, 1.4-1.6-fold, 1.6-1.8-fold, 1.8-2-fold, or two-fold more kynurenine than unmodified bacteria of the same bacterial subtype under the same conditions. In yet another embodiment, the genetically engineered bacteria consume about three-fold, four-fold, about three-fold, four-fold, five-fold, six-fold, seven-fold, eight-fold, nine-fold, ten-fold, fifteen-fold, twenty-fold, thirty-fold, forty-fold, fifty-fold, hundred-fold, five hundred-fold, or one-thousand-fold more kynurenine than unmodified bacteria of the same bacterial subtype under the same conditions.

[0972] In any of these kynurenine consumption and arginine production and/or ammonia consumption embodiments, the bacteria genetically engineered to consume kynurenine and optionally produce tryptophan produce at least about 0% to 2% to 4%, 4% to 6%,6% to 8%, 8% to 10%, 10% to 12%, 12% to 14%, 14% to 16%, 16% to 18%, 18% to 20%, 20% to 25%,25% to 30%, 30% to 35%, 35% to 40%,40% to 45% 45% to 50%, 50% to 55%, 55% to 60%, 60% to 65%, 65% to 70% to 80%, 80% to 90%, or 90% to 100% more tryptophan than unmodified bacteria of the same bacterial subtype under the same conditions. In yet another embodiment, the genetically engineered bacteria produce at least about 1.0-1.2-fold, 1.2-1.4-fold, 1.4-1.6-fold, 1.6-1.8-fold, 1.8-2-fold, or two-fold more tryptophan than unmodified bacteria of the same bacterial subtype under the same conditions. In yet another embodiment, the genetically engineered bacteria produce about three-fold, four-fold, five-fold, six-fold, seven-fold, eight-fold, nine-fold, ten-fold, fifteen-fold, twenty-fold, thirty-fold, forty-fold, or fifty-fold, hundred-fold, five hundred-fold, or one-thousand-fold more tryptophan than unmodified bacteria of the same bacterial subtype under the same conditions.

[0973] In any of these kynurenine consumption and arginine production and/or ammonia consumption embodiments, the genetically engineered bacteria increase the kynurenine consumption rate by 0% to 2% to 4%, 4% to 6%,6% to 8%, 8% to 10%, 10% to 12%, 12% to 14%, 14% to 16%, 16% to 18%, 18% to 20%, 20% to 25%,25% to 30%, 30% to 35%, 35% to 40%,40% to 45% 45% to 50%, 50% to 55%, 55% to 60%, 60% to 65%, 65% to 70% to 80%, 80% to 90%, or 90% to 100% relative to unmodified bacteria of the same bacterial subtype under the same conditions. In yet another kynurenine consumption and arginine production embodiment, the genetically engineered bacteria increase the kynurenine consumption rate by 1.0-1.2-fold, 1.2-1.4-fold, 1.4-1.6-fold, 1.6-1.8-fold, 1.8-2-fold, or two-fold more relative to unmodified bacteria of the same bacterial subtype under the same conditions. In yet another embodiment, the genetically engineered bacteria increase the kynurenine consumption rate by about three-fold, four-fold, five-fold, six-fold, seven-fold, eight-fold, nine-fold, ten-fold, fifteen-fold, twenty-fold, thirty-fold, forty-fold, or fifty-fold, hundred-fold, five hundred-fold, or one-thousand-fold relative to unmodified bacteria of the same bacterial subtype under the same conditions.

[0974] In one kynurenine consumption and arginine production and/or ammonia consumption embodiment, the genetically engineered bacteria increase the kynurenine consumption by about 80% to 100% relative to unmodified bacteria of the same bacterial subtype under the same conditions, after 4 hours. In one kynurenine consumption and arginine production and/or ammonia consumption embodiment, the genetically engineered bacteria increase the kynurenine consumption by about 90% to 100% relative to unmodified bacteria of the same bacterial subtype under the same conditions after 4 hours. In one specific kynurenine consumption and arginine production and/or ammonia consumption embodiment, the genetically engineered bacteria increase the kynurenine consumption by about 95% to 100% relative to unmodified bacteria of the same bacterial subtype under the same conditions, after 4 hours. In one specific embodiment, the genetically engineered bacteria increase the kynurenine consumption by about 99% to 100% relative to unmodified bacteria of the same bacterial subtype under the same conditions, after 4 hours. In yet another embodiment, the genetically engineered bacteria increase the kynurenine consumption by about 10-50 fold after 4 hours. In yet another embodiment, the genetically engineered bacteria increase the kynurenine consumption by about 50-100 fold after 4 hours.

[0975] In yet another embodiment, the genetically engineered bacteria increase the kynurenine consumption by about 100-500 fold after 4 hours. In yet another embodiment, the genetically engineered bacteria increase the kynurenine consumption by about 500-1000 fold after 4 hours. In yet another embodiment, the genetically engineered bacteria increase the kynurenine consumption by about 1000-5000 fold after 4 hours. In yet another embodiment, the genetically engineered bacteria increase the kynurenine consumption by about 5000-10000 fold after 4 hours. In yet another embodiment, the genetically engineered bacteria increase the kynurenine consumption by about 10000-1000 fold after 4 hours.

[0976] In any kynurenine consumption and arginine production and/or ammonia consumption embodiments, the genetically engineered bacteria produce at least about 0% to 2%, 2% to 4%, 4% to 6%,6% to 8%, 8% to 10%, 10% to 12%, 12% to 14%, 14% to 16%, 16% to 18%, 18% to 20%, 20% to 25%,25% to 30%, 30% to 35%, 35% to 40%,40% to 45% 45% to 50%, 50% to 55%, 55% to 60%, 60% to 65%, 65% to 70% to 80%, 80% to 90%, or 90% to 100% more arginine than unmodified bacteria of the same bacterial subtype under the same conditions.

[0977] In yet another kynurenine consumption and arginine production and/or ammonia consumption embodiment, the genetically engineered bacteria produce at least about 1.0-1.2-fold, 1.2-1.4-fold, 1.4-1.6-fold, 1.6-1.8-fold, 1.8-2-fold, or two-fold more arginine than unmodified bacteria of the same bacterial subtype under the same conditions. In yet another embodiment, the genetically engineered bacteria produce about three-fold, four-fold, five-fold, six-fold, seven-fold, eight-fold, nine-fold, ten-fold, fifteen-fold, twenty-fold, thirty-fold, forty-fold, or fifty-fold, hundred-fold, five hundred-fold, or one-thousand-fold more arginine than unmodified bacteria of the same bacterial subtype under the same conditions.

[0978] In any of these kynurenine consumption and arginine production and/or ammonia consumption embodiments, the genetically engineered bacteria consume 0% to 2%, 2% to 4%, 4% to 6%,6% to 8%, 8% to 10%, 10% to 12%, 12% to 14%, 14% to 16%, 16% to 18%, 18% to 20%, 20% to 25%,25% to 30%, 30% to 35%, 35% to 40%,40% to 45% 45% to 50%, 50% to 55%, 55% to 60%, 60% to 65%, 65% to 70% to 80%, 80% to 90%, or 90% to 100% more glutamate than unmodified bacteria of the same bacterial subtype under the same conditions. In yet another embodiment, the genetically engineered bacteria consume 1.0-1.2-fold, 1.2-1.4-fold, 1.4-1.6-fold, 1.6-1.8-fold, 1.8-2-fold, or two-fold more glutamate than unmodified bacteria of the same bacterial subtype under the same conditions. In yet another embodiment, the genetically engineered bacteria consume about three-fold, four-fold, five-fold, six-fold, seven-fold, eight-fold, nine-fold, ten-fold, fifteen-fold, twenty-fold, thirty-fold, forty-fold, fifty-fold, hundred-fold, five hundred-fold, or one-thousand-fold more glutamate than unmodified bacteria of the same bacterial subtype under the same conditions.

[0979] In any of these kynurenine consumption and arginine production and/or ammonia consumption embodiments, the genetically engineered bacteria consume 0% to 2%, 2% to 4%, 4% to 6%,6% to 8%, 8% to 10%, 10% to 12%, 12% to 14%, 14% to 16%, 16% to 18%, 18% to 20%, 20% to 25%,25% to 30%, 30% to 35%, 35% to 40%,40% to 45% 45% to 50%, 50% to 55%, 55% to 60%, 60% to 65%, 65% to 70% to 80%, 80% to 90%, or 90% to 100% more ammonia than unmodified bacteria of the same bacterial subtype under the same conditions. In yet another embodiment, the genetically engineered bacteria consume 1.0-1.2-fold, 1.2-1.4-fold, 1.4-1.6-fold, 1.6-1.8-fold, 1.8-2-fold, or two-fold more ammonia than unmodified bacteria of the same bacterial subtype under the same conditions. In yet another embodiment, the genetically engineered bacteria consume about three-fold, four-fold, five-fold, six-fold, seven-fold, eight-fold, nine-fold, ten-fold, fifteen-fold, twenty-fold, thirty-fold, forty-fold, fifty-fold, hundred-fold, five hundred-fold, or one-thousand-fold more ammonia than unmodified bacteria of the same bacterial subtype under the same conditions.

[0980] In any of these kynurenine consumption and arginine production and/or ammonia consumption embodiments, the bacteria are capable of reducing cell proliferation by at least about 10% to 20%, 20% to 25%, 25% to 30%, 30% to 40%, 40% to 50%, 50% to 60%, 60% to 70%, 70% to 75%, 75% to 80%, 80% to 85%, 85% to 90%, 90% to 95%, 95% to 99%, or more as compared to an unmodified bacteria of the same subtype under the same conditions. In any of these embodiments, the bacteria are capable of reducing tumor growth by at least about 10% to 20%, 20% to 25%, 25% to 30%, 30% to 40%, 40% to 50%, 50% to 60%, 60% to 70%, 70% to 75%, 75% to 80%, 80% to 85%, 85% to 90%, 90% to 95%, 95% to 99%, or more as compared to an unmodified bacteria of the same subtype under the same conditions. In any of these embodiments, the bacteria are capable of reducing tumor size by at least about 10% to 20%, 20% to 25%, 25% to 30%, 30% to 40%, 40% to 50%, 50% to 60%, 60% to 70%, 70% to 75%, 75% to 80%, 80% to 85%, 85% to 90%, 90% to 95%, 95% to 99%, or more as compared to an unmodified bacteria of the same subtype under the same conditions. In any of these embodiments, the bacteria are capable of reducing tumor volume by at least about 10% to 20%, 20% to 25%, 25% to 30%, 30% to 40%, 40% to 50%, 50% to 60%, 60% to 70%, 70% to 75%, 75% to 80%, 80% to 85%, 85% to 90%, 90% to 95%, 95% to 99%, or more as compared to an unmodified bacteria of the same subtype under the same conditions. In any of these embodiments, the bacteria are capable of reducing tumor weight by at least about 10% to 20%, 20% to 25%, 25% to 30%, 30% to 40%, 40% to 50%, 50% to 60%, 60% to 70%, 70% to 75%, 75% to 80%, 80% to 85%, 85% to 90%, 90% to 95%, 95% to 99%, or more as compared to an unmodified bacteria of the same subtype under the same conditions.

[0981] In some kynurenine consumption and arginine production and/or ammonia consumption embodiments, the genetically engineered microorganisms are capable of expressing any one or more of the described circuits for the kynurenine consumption and arginine production in low-oxygen conditions, and/or in the presence of cancer and/or the tumor microenvironment, or tissue specific molecules or metabolites, and/or in the presence of molecules or metabolites associated with inflammation or immune suppression, and/or in the presence of metabolites that may be present in the gut, and/or in the presence of metabolites that may or may not be present in vivo, and may be present in vitro during strain culture, expansion, production and/or manufacture, such as arabinose, cumate, and salicylate and others described herein. In some embodiments such an inducer may be administered in vivo to induce effector gene expression. In some embodiments, the gene sequences(s) encoding circuitry for kynurenine consumption and arginine production are controlled by a promoter inducible by such conditions and/or inducers. In some embodiments, the gene sequences(s) are controlled by a constitutive promoter, as described herein. In some embodiments, the gene sequences(s) are controlled by a constitutive promoter, and are expressed in in vivo conditions and/or in vitro conditions, e.g., during expansion, production and/or manufacture, as described herein. In any of these kynurenine consumption and arginine production and/or ammonia consumption embodiments, any one or more of the described adenosine degradation circuits and kynurenine consumption circuits are present on one or more plasmids (e.g., high copy or low copy) or are integrated into one or more sites in the microorganismal chromosome.

[0982] Also, in some embodiments, the genetically engineered microorganisms are capable of expressing any one or more of the described circuits and further comprise one or more of the following: (1) one or more auxotrophies, such as any auxotrophies known in the art and provided herein, e.g., thyA and/or dapA auxotrophy, (2) one or more kill switch circuits, such as any of the kill-switches described herein or otherwise known in the art, (3) one or more antibiotic resistance circuits, (4) one or more transporters for importing biological molecules or substrates, such any of the transporters described herein or otherwise known in the art, (5) one or more secretion circuits, such as any of the secretion circuits described herein and otherwise known in the art, (6) one or more surface display circuits, such as any of the surface display circuits described herein and otherwise known in the art and (7) one or more circuits for the production or degradation of one or more metabolites (e.g., kynurenine, tryptophan, adenosine, arginine) described herein (8) combinations of one or more of such additional circuits.

[0983] In any of these embodiments, the bacteria genetically engineered to consume kynurenine and produce arginine and/or consume ammonia may be administered alone or in combination with one or more immune checkpoint inhibitors described herein, including but not limited anti-CTLA4, anti-PD1, or anti-PD-L1 antibodies. In any of these embodiments, the one or more bacteria genetically engineered consume kynurenine and produce arginine and/or consume ammonia may be genetically engineered to produce and secrete or display on their surface one or more immune checkpoint inhibitors described herein, including but not limited to anti-CTLA4, anti-PD1, or anti-PD-L1 antibodies.

[0984] In any of these embodiments, the one or more bacteria genetically engineered consume kynurenine and produce arginine and/or consume ammonia may be administered alone or in combination with one or more immune stimulatory agonists described herein, e.g., agonistic antibodies, including but not limited to anti-OX40, anti-41BB, or anti-GITR antibodies. In any of these embodiments, the one or more bacteria genetically engineered consume kynurenine and produce arginine and/or consume ammonia may be genetically engineered to produce and secrete or display on their surface one or more immune stimulatory agonists described herein, e.g., agonistic antibodies, including but not limited to anti-OX40, anti-41BB, or anti-GITR antibodies.

[0985] In any of these metabolic converter combination circuit embodiments, (i.e., AD+Kyn, AD+Arg/NH4+, Kyn+Arg) the genetically engineered bacteria comprising gene sequence(s) encoding the metabolic converter combinations further comprise gene sequence(s) encoding one or more further effector molecule(s), i.e., therapeutic molecule(s) or a metabolic converter(s). In any of these embodiments, the circuit encoding the metabolic converter combinations may be combined with a circuit encoding one or more immune initiators or immune sustainers as described herein, in the same or a different bacterial strain (combination circuit or mixture of strains). The circuit encoding the immune initiators or immune sustainers may be under the control of a constitutive or inducible promoter, e.g., low oxygen inducible promoter or any other constitutive or inducible promoter described herein. In any of these embodiments, the gene sequence(s) encoding the metabolic converter combinations may be combined with gene sequence(s) encoding one or more STING agonist producing enzymes, as described herein, in the same or a different bacterial strain (combination circuit or mixture of strains). In some embodiments, the gene sequences which are combined with the gene sequence(s) encoding the metabolic converter combinations encode DacA. DacA may be under the control of a constitutive or inducible promoter, e.g., low oxygen inducible promoter such as FNR or any other constitutive or inducible promoter described herein. In some embodiments, the dacA gene is integrated into the chromosome. In some embodiments, the gene sequences which are combined with the gene sequence(s) encoding the metabolic converter combinations encode cGAS. cGAS may be under the control of a constitutive or inducible promoter, e.g., low oxygen inducible promoter such as FNR or any other constitutive or inducible promoter described herein. In some embodiments, the gene encoding cGAS is integrated into the chromosome.

[0986] In any of these metabolic converter combination embodiments (i.e., AD+Kyn, AD+Arg/NH4+, Kyn+Arg), the bacteria may further comprise an auxotrophic modification, e.g., a mutation or deletion in DapA, ThyA, or both. In any of these embodiments, the bacteria may further comprise a phage modification, e.g., a mutation or deletion, in an endogenous prophage as described herein.

### Regulating Expression of Effectors and Immune Modulators

[0987] In some embodiments, the bacterial cell comprises a stably maintained plasmid or chromosome carrying the gene(s) encoding payload (s), such that the payload(s) can be expressed in the host cell, and the host cell is capable of survival and/or growth in vitro, e.g., in medium, and/or in vivo, e.g., in the gut or in the tumor microenvironment. In some embodiments, bacterial cell comprises two or more distinct payloads or operons, e.g., two or more payload genes. In some embodiments, bacterial cell comprises three or more distinct transporters or operons, e.g., three or more payload genes. In some embodiments, bacterial cell comprises 4, 5, 6, 7, 8, 9, 10, or more distinct payloads or operons, e.g., 4, 5, 6, 7, 8, 9, 10, or more payload genes.

[0988] Herein the terms “payload” “polypeptide of interest” or “polypeptides of interest”, “protein of interest”, “proteins of interest”, “payloads” “effector molecule”, “effector” refers to one or more effector molecules described herein and/or one or more enzyme(s) or polypeptide(s) function as enzymes needed for the production of such effector molecules. Non-limiting examples of payloads include IL-12, IL-2, IL-15, IL-18, IL-7, IL-21, CD40 agonist, CD40 agonist, CD226 agonist, CD137 agonist, ICOS agonist, OXO40 agonist, GM-CSF, CXCL10, CXCL9, antibodies, e.g., scFvs, including but not limited to checkpoint inhibitors (e.g., PD1, PDL1, CTLA4, anti-LAG3, anti-TIM3 and others described herein), kynureninase, tryptophan and/or arginine production enzymes, adenosine degradation enzymes.

[0989] As used herein, the term “polypeptide of interest” or “polypeptides of interest”, “protein of interest”, “proteins of interest”, “payload”, “payloads” further includes any or a plurality of any of the tryptophan synthesis enzymes, kynurenine degrading enzymes, adenosine degrading enzymes, arginine producing enzymes, and other metabolic pathway enzymes described herein. As used herein, the term “gene of interest” or “gene sequence of interest” includes any or a plurality of any of the gene(s) an/or gene sequence(s) and or gene cassette(s) encoding one or more immune modulator(s) described herein.

[0990] In some embodiments, the genetically engineered bacteria comprise multiple copies of the same payload gene(s). In some embodiments, the gene encoding the payload is present on a plasmid and operably linked to a directly or indirectly inducible promoter. In some embodiments, the gene encoding the payload is present on a plasmid and operably linked to a constitutive promoter. In some embodiments, the gene encoding the payload is present on a plasmid and operably linked to a promoter that is induced under low-oxygen or anaerobic conditions. In some embodiments, the gene encoding the payload is present on plasmid and operably linked to a promoter that is induced by exposure to tetracycline or arabinose, cumate, and salicylate, or another chemical or nutritional inducer described herein.

[0991] In some embodiments, the gene encoding the payload is present on a chromosome and operably linked to a directly or indirectly inducible promoter. In some embodiments, the gene encoding the payload is present on a chromosome and operably linked to a constitutive promoter. In some embodiments, the gene encoding the payload is present in the chromosome and operably linked to a promoter that is induced under low-oxygen or anaerobic conditions. In some embodiments, the gene encoding the payload is present on chromosome and operably linked to a promoter that is induced by exposure to tetracycline or arabinose, cumate, and salicylate, or another chemical or nutritional inducer described herein.

[0992] In some embodiments, the genetically engineered bacteria comprise two or more payloads, all of which are present on the chromosome. In some embodiments, the genetically engineered bacteria comprise two or more payloads, all of which are present on one or more same or different plasmids. In some embodiments, the genetically engineered bacteria comprise two or more payloads, some of which are present on the chromosome and some of which are present on one or more same or different plasmids.

[0993] In any of the embodiments described above, the one or more payload(s) for producing the effector or immune modulator combinations are operably linked to one or more directly or indirectly inducible promoter(s). In some embodiments, the one or more payload(s) are operably linked to a directly or indirectly inducible promoter that is induced under exogeneous environmental conditions, e.g., conditions found in the gut, the tumor microenvironment or other tissue specific conditions. In some embodiments, the one or more payload(s) are operably linked to a directly or indirectly inducible promoter that is induced by metabolites found in the gut, the tumor microenvironment or other specific conditions. In some embodiments, the one or more payload(s) are operably linked to a directly or indirectly inducible promoter that is induced under low-oxygen or anaerobic conditions. In some embodiments, the one or more payload(s) are operably linked to a directly or indirectly inducible promoter that is induced under inflammatory conditions (e.g., RNS, ROS), as described herein. In some embodiments, the one or more payload(s) are operably linked to a directly or indirectly inducible promoter that is induced under immunosuppressive conditions, e.g., as found in the tumor, as described herein. In some embodiments, the two or more gene sequence(s) are linked to a directly or indirectly inducible promoter that is induced by exposure a chemical or nutritional inducer, which may or may not be present under in vivo conditions and which may be present during in vitro conditions (such as strain culture, expansion, manufacture), such as tetracycline or arabinose, cumate, and salicylate, or others described herein. In some embodiments, the two or more payloads are all linked to a constitutive promoter.

[0994] In some embodiments, the promoter is induced under in vivo conditions, e.g., the gut, as described herein. In some embodiments, the promoters is induced under in vitro conditions, e.g., various cell culture and/or cell manufacturing conditions, as described herein. In some embodiments, the promoter is induced under in vivo conditions, e.g., the gut, as described herein, and under in vitro conditions, e.g., various cell culture and/or cell production and/or manufacturing conditions, as described herein.

[0995] In some embodiments, the promoter that is operably linked to the gene encoding the payload is directly induced by exogenous environmental conditions (e.g., in vivo and/or in vitro and/or production/manufacturing conditions). In some embodiments, the promoter that is operably linked to the gene encoding the payload is indirectly induced by exogenous environmental conditions (e.g., in vivo and/or in vitro and/or production/manufacturing conditions).

[0996] In some embodiments, the promoter is directly or indirectly induced by exogenous environmental conditions specific to the gut of a mammal. In some embodiments, the promoter is directly or indirectly induced by exogenous environmental conditions specific to the hypoxic environment of a tumor and/or the small intestine of a mammal In some embodiments, the promoter is directly or indirectly induced by low-oxygen or anaerobic conditions such as the hypoxic environment of a tumor and/or the environment of the mammalian gut. In some embodiments, the promoter is directly or indirectly induced by molecules or metabolites that are specific to the tumor, a particular tissue or the gut of a mammal In some embodiments, the promoter is directly or indirectly induced by a molecule that is co-administered with the bacterial cell.

### FNR Dependent Regulation

[0997] The genetically engineered bacteria of the invention comprise a gene or gene cassette for producing an immune modulator, wherein the gene or gene cassette is operably linked to a directly or indirectly inducible promoter that is controlled by exogenous environmental condition(s). In some embodiments, the inducible promoter is an oxygen level-dependent promoter and an immune modulator is expressed in low-oxygen, microaerobic, or anaerobic conditions. For example, in low oxygen conditions, the oxygen level-dependent promoter is activated by a corresponding oxygen level-sensing transcription factor, thereby driving production of an immune modulator.

[0998] Bacteria have evolved transcription factors that are capable of sensing oxygen levels. Different signaling pathways may be triggered by different oxygen levels and occur with different kinetics. An oxygen level-dependent promoter is a nucleic acid sequence to which one or more oxygen level-sensing transcription factors is capable of binding, wherein the binding and/or activation of the corresponding transcription factor activates downstream gene expression. In one embodiment, the genetically engineered bacteria comprise a gene or gene cassette for producing a payload under the control of an oxygen level-dependent promoter. In a more specific aspect, the genetically engineered bacteria comprise a gene or gene cassette for producing a payload under the control of an oxygen level-dependent promoter that is activated under low-oxygen or anaerobic environments, such as the hypoxic environment of a tumor and/or the environment of the mammalian gut.

[0999] In certain embodiments, the bacterial cell comprises a gene encoding a payload which is operably linked to a fumarate and nitrate reductase regulator (FNR) responsive promoter. In certain embodiments, the bacterial cell comprises a gene encoding a payload expressed under the control of a fumarate and nitrate reductase regulator (FNR) responsive promoter. In E. coli, FNR is a major transcriptional activator that controls the switch from aerobic to anaerobic metabolism (Unden et al., 1997). In the anaerobic state, FNR dimerizes into an active DNA binding protein that activates hundreds of genes responsible for adapting to anaerobic growth. In the aerobic state, FNR is prevented from dimerizing by oxygen and is inactive. FNR responsive promoters include, but are not limited to, the FNR responsive promoters of SEQ ID NO: 563-579. Underlined sequences are predicted ribosome binding sites, and bolded sequences are restriction sites used for cloning.

[1000] FNR promoter sequences are known in the art, and any suitable FNR promoter sequence(s) may be used in the genetically engineered bacteria of the invention. Any suitable FNR promoter(s) may be combined with any suitable payload.

[1001] As used herein the term “payload” refers to one or more effector molecules, e g immune modulator(s), including but not limited to immune initiators and immune sustainers described herein.

[1002] Non-limiting FNR promoter sequences are provided in SEQ ID NO: 563-579. In some embodiments, the genetically engineered bacteria of the disclosure comprise a payload, e.g., an effector or an immune modulator, which is operably linked to a low oxygen inducible, e.g., FNR regulated promoter comprising: SEQ ID NO: 563, SEQ ID NO: 564, SEQ ID NO: 565, SEQ ID NO: 566, SEQ ID NO: 567, SEQ ID NO: 568, SEQ ID NO: 569, nirB1 promoter (SEQ ID NO: 570), nirB2 promoter (SEQ ID NO: 571), nirB3 promoter (SEQ ID NO: 572), ydfZ promoter (SEQ ID NO: 573), nirB promoter fused to a strong ribosome binding site (SEQ ID NO: 574), ydfZ promoter fused to a strong ribosome binding site (SEQ ID NO: 575), fnrS, an anaerobically induced small RNA gene (fnrS1 promoter SEQ ID NO: 576 or fnrS2 promoter SEQ ID NO: 577), nirB promoter fused to a crp binding site (SEQ ID NO: 578), and fnrS fused to a crp binding site (SEQ ID NO: 579). In some embodiments, the FNR-responsive promoter is at least about 80%, at least about 85%, at least about 90%, at least about 95%, or at least about 99% homologous to a sequence selected from SEQ ID NOs: 563-579. In another embodiment, the genetically engineered bacteria comprise a gene sequence comprising an FNR-responsive promoter comprising a sequence selected from SEQ ID NOs: 563-579. In yet another embodiment, the FNR-responsive promoter consists of a sequence selected from SEQ ID NOs: 563-579. In some embodiments, the genetically engineered bacteria of the disclosure comprise a gene encoding an effector molecule, e.g., an immune initiator or immune stimulator, which is operably linked to an FNR-responsive promoter which is at least about 80%, at least about 85%, at least about 90%, at least about 95%, or at least about 99% homologous to a sequence selected from SEQ ID NOs: 1281 or SEQ ID NO: 1282. In another embodiment, the genetically engineered bacteria comprise encode an effector molecule operably linked to an FNR-responsive promoter comprising a sequence selected from SEQ ID NOs: 1281 or SEQ ID NO: 1282. In yet another embodiment, the FNR-responsive promoter consists of a sequence selected from SEQ ID NOs: 1281 or SEQ ID NO: 1282.

[1003] In some embodiments, multiple distinct FNR nucleic acid sequences are inserted in the genetically engineered bacteria. In alternate embodiments, the genetically engineered bacteria comprise a gene encoding a payload expressed under the control of an alternate oxygen level-dependent promoter, e.g., DNR (Trunk et al., 2010) or ANR (Ray et al., 1997). In these embodiments, expression of the payload gene is particularly activated in a low-oxygen or anaerobic environment, such as in the gut. In some embodiments, gene expression is further optimized by methods known in the art, e.g., by optimizing ribosomal binding sites and/or increasing mRNA stability. In one embodiment, the mammalian gut is a human mammalian gut.

[1004] In another embodiment, the genetically engineered bacteria comprise the gene or gene cassette for producing an immune modulator expressed under the control of anaerobic regulation of arginine deiminase and nitrate reduction transcriptional regulator (ANR). In P. aeruginosa, ANR is “required for the expression of physiological functions which are inducible under oxygen-limiting or anaerobic conditions” (Winteler et al., 1996; Sawers 1991). P. aeruginosa ANR is homologous with E. coli FNR, and “the consensus FNR site (TTGAT----ATCAA) was recognized efficiently by ANR and FNR” (Winteler et al., 1996). Like FNR, in the anaerobic state, ANR activates numerous genes responsible for adapting to anaerobic growth. In the aerobic state, ANR is inactive. Pseudomonas fluorescens, Pseudomonas putida, Pseudomonas syringae, and Pseudomonas mendocina all have functional analogs of ANR (Zimmermann et al., 1991). Promoters that are regulated by ANR are known in the art, e.g., the promoter of the arcDABC operon (see, e.g., Hasegawa et al., 1998).

[1005] In other embodiments, the one or more gene sequence(s) for producing a payload are expressed under the control of an oxygen level-dependent promoter fused to a binding site for a transcriptional activator, e.g., CRP. CRP (cyclic AMP receptor protein or catabolite activator protein or CAP) plays a major regulatory role in bacteria by repressing genes responsible for the uptake, metabolism, and assimilation of less favorable carbon sources when rapidly metabolizable carbohydrates, such as glucose, are present (Wu et al., 2015). This preference for glucose has been termed glucose repression, as well as carbon catabolite repression (Deutscher, 2008; Gorke and Stulke, 2008). In some embodiments, the gene or gene cassette for producing an immune modulator is controlled by an oxygen level-dependent promoter fused to a CRP binding site. In some embodiments, the one or more gene sequence(s) for a payload are controlled by a FNR promoter fused to a CRP binding site. In these embodiments, cyclic AMP binds to CRP when no glucose is present in the environment. This binding causes a conformational change in CRP, and allows CRP to bind tightly to its binding site. CRP binding then activates transcription of the gene or gene cassette by recruiting RNA polymerase to the FNR promoter via direct protein-protein interactions. In the presence of glucose, cyclic AMP does not bind to CRP and transcription of the gene or gene cassette for producing a payload is repressed. In some embodiments, an oxygen level-dependent promoter (e.g., an FNR promoter) fused to a binding site for a transcriptional activator is used to ensure that the gene or gene cassette for producing a payload is not expressed under anaerobic conditions when sufficient amounts of glucose are present, e.g., by adding glucose to growth media in vitro.

[1006] In some embodiments, the genetically engineered bacteria comprise an oxygen level-dependent promoter from a different species, strain, or substrain of bacteria. In some embodiments, the genetically engineered bacteria comprise an oxygen level-sensing transcription factor, e.g., FNR, ANR or DNR, from a different species, strain, or substrain of bacteria. In some embodiments, the genetically engineered bacteria comprise an oxygen level-sensing transcription factor and corresponding promoter from a different species, strain, or substrain of bacteria. The heterologous oxygen-level dependent transcriptional regulator and/or promoter increases the transcription of genes operably linked to said promoter, e.g., one or more gene sequence(s) for producing the payload(s) in a low-oxygen or anaerobic environment, as compared to the native gene(s) and promoter in the bacteria under the same conditions. In certain embodiments, the non-native oxygen-level dependent transcriptional regulator is an FNR protein from N. gonorrhoeae (see, e.g., Isabella et al., 2011). In some embodiments, the corresponding wild-type transcriptional regulator is left intact and retains wild-type activity. In alternate embodiments, the corresponding wild-type transcriptional regulator is deleted or mutated to reduce or eliminate wild-type activity.

[1007] In some embodiments, the genetically engineered bacteria comprise a wild-type oxygen-level dependent transcriptional regulator, e.g., FNR, ANR, or DNR, and corresponding promoter that is mutated relative to the wild-type promoter from bacteria of the same subtype. The mutated promoter enhances binding to the wild-type transcriptional regulator and increases the transcription of genes operably linked to said promoter, e.g., the gene encoding the payload, in a low-oxygen or anaerobic environment, as compared to the wild-type promoter under the same conditions. In some embodiments, the genetically engineered bacteria comprise a wild-type oxygen-level dependent promoter, e.g., FNR, ANR, or DNR promoter, and corresponding transcriptional regulator that is mutated relative to the wild-type transcriptional regulator from bacteria of the same subtype. The mutated transcriptional regulator enhances binding to the wild-type promoter and increases the transcription of genes operably linked to said promoter, e.g., the gene encoding the payload, in a low-oxygen or anaerobic environment, as compared to the wild-type transcriptional regulator under the same conditions. In certain embodiments, the mutant oxygen-level dependent transcriptional regulator is an FNR protein comprising amino acid substitutions that enhance dimerization and FNR activity (see, e.g., Moore et al., (2006). In some embodiments, both the oxygen level-sensing transcriptional regulator and corresponding promoter are mutated relative to the wild-type sequences from bacteria of the same subtype in order to increase expression of the payload in low-oxygen conditions.

[1008] In some embodiments, the bacterial cells comprise multiple copies of the endogenous gene encoding the oxygen level-sensing transcriptional regulator, e.g., the FNR gene. In some embodiments, the gene encoding the oxygen level-sensing transcriptional regulator is present on a plasmid. In some embodiments, the gene encoding the oxygen level-sensing transcriptional regulator and the gene encoding the payload are present on different plasmids. In some embodiments, the gene encoding the oxygen level-sensing transcriptional regulator and the gene encoding the payload are present on the same plasmid.

[1009] In some embodiments, the gene encoding the oxygen level-sensing transcriptional regulator is present on a chromosome. In some embodiments, the gene encoding the oxygen level-sensing transcriptional regulator and the gene encoding the payload are present on different chromosomes. In some embodiments, the gene encoding the oxygen level-sensing transcriptional regulator and the gene encoding the payload are present on the same chromosome. In some instances, it may be advantageous to express the oxygen level-sensing transcriptional regulator under the control of an inducible promoter in order to enhance expression stability. In some embodiments, expression of the transcriptional regulator is controlled by a different promoter than the promoter that controls expression of the gene encoding the payload. In some embodiments, expression of the transcriptional regulator is controlled by the same promoter that controls expression of the payload. In some embodiments, the transcriptional regulator and the payload are divergently transcribed from a promoter region.

### RNS-Dependent Regulation

[1010] In some embodiments, the genetically engineered bacterium that expresses a payload under the control of a promoter that is activated by inflammatory conditions. In one embodiment, the gene for producing the payload is expressed under the control of an inflammatory-dependent promoter that is activated in inflammatory environments, e.g., a reactive nitrogen species or RNS promoter. In some embodiments, the genetically engineered bacteria of the invention comprise a tunable regulatory region that is directly or indirectly controlled by a transcription factor that is capable of sensing at least one reactive nitrogen species. Suitable RNS inducible promoters, e.g., inducible by reactive nitrogen species are described in International Patent Application PCT/US2017/013072, filed Jan. 11, 2017, published as WO2017/123675, the contents of which is herein incorporated by reference in its entirety.

[1011] Examples of transcription factors that sense RNS and their corresponding RNS-responsive genes, promoters, and/or regulatory regions include, but are not limited to, those shown in Table 9.

TABLE 9
Examples of RNS-sensing transcription
factors and RNS-responsive genes

| RNS-sensing | Primarily | Examples of responsive |
|---|---|---|
| transcription | capable | genes, promoters, |
| factor: | of sensing: | and/or regulatory regions: |
| NsrR | NO | norB, aniA, nsrR, hmpA, ytfE, |
| | | ygbA, hcp, hcr, nrfA, aox |
| NorR | NO | norVW, nor |
| DNR | NO | norCB, nir, nor, nos |

### ROS-Dependent Regulation

[1012] In some embodiments, the genetically engineered bacterium that expresses a payload under the control of a promoter that is activated by conditions of cellular damage. In one embodiment, the gene for producing the payload is expressed under the control of a cellular damaged-dependent promoter that is activated in environments in which there is cellular or tissue damage, e.g., a reactive oxygen species or ROS promoter. In some embodiments, the genetically engineered bacteria of the invention comprise a tunable regulatory region that is directly or indirectly controlled by a transcription factor that is capable of sensing at least one reactive oxygen species. Suitable ROS inducible promoters, e.g., inducible by reactive oxygen species are described in International Patent Application PCT/US2017/013072, filed Jan. 11, 2017, published as WO2017/123675, the contents of which is herein incorporated by reference in its entirety.

[1013] Examples of transcription factors that sense ROS and their corresponding ROS-responsive genes, promoters, and/or regulatory regions include, but are not limited to, those shown in Table 10.

TABLE 10
Examples of ROS-sensing
transcription factors and ROS-responsive genes

| ROS-sensing | Primarily | |
|---|---|---|
| transcription | capable | Examples of responsive genes, |
| factor: | of sensing: | promoters, and/or regulatory regions: |
| OxyR | H₂O₂ | ahpC; ahpF; dps; dsbG; fhuF; flu; |
| | | fur; gor; grxA; hemH; katG; oxyS; |
| | | sufA; sufB; sufC; sufD; sufE; sufS; |
| | | trxC; uxuA; yaaA; yaeH; yaiA; ybjM; |
| | | ydcH; ydeN; ygaQ; yljA; ytfK |
| PerR | H₂O₂ | katA; ahpCF; mrgA; zoaA; fur; |
| | | hemAXCDBL; srfA |
| OhrR | Organic | ohrA |
| | peroxides | |
| | NaOCl | |
| SoxR | •O₂⁻ | soxS |
| | NO• | |
| | (also capable of | |
| | sensing H₂O₂) | |
| RosR | H₂O₂ | rbtT; tnp16a; rluC1; tnp5a; mscL; |
| | | tnp2d; phoD; tnp15b; pstA; tnp5b; |
| | | xylC; gabD1; rluC2; cgtS9; azlC; |
| | | narKGHJI; rosR |

### Other Promoters

[1014] In some embodiments, the genetically engineered bacteria comprise the gene or gene cassette for producing an immune modulator expressed under the control of an inducible promoter that is responsive to specific molecules or metabolites in the environment, e.g., the tumor microenvironment, a specific tissue, or the mammalian gut. Any molecule or metabolite found in the mammalian gut, in a healthy and/or disease state, or in the tumor microenvironment, may be used to induce payload expression.

[1015] In alternate embodiments, the gene or gene cassette for producing an immune modulator is operably linked to a nutritional or chemical inducer which is not present in the environment, e.g., the tumor microenvironment, a specific tissue, or the mammalian gut. In some embodiments, the nutritional or chemical inducer is administered prior, concurrently or sequentially with the genetically engineered bacteria.

### Other Inducible Promoters

[1016] In some embodiments, one or more gene sequence(s) encoding polypeptides of interest described herein is present on a plasmid and operably linked to promoter a directly or indirectly inducible by one or more nutritional and/or chemical inducer(s) and/or metabolite(s). In some embodiments, the bacterial cell comprises a stably maintained plasmid or chromosome carrying the gene encoding the immune modulator, which is induced by one or more nutritional and/or chemical inducer(s) and/or metabolite(s), such that the immune modulator can be expressed in the host cell, and the host cell is capable of survival and/or growth in vitro, e.g., under culture conditions, and/or in vivo, e.g., in the gut and/or the tumor microenvironment.

[1017] In some embodiments, expression of one or more immune modulator(s) and/or other polypeptide(s) of interest is driven directly or indirectly by one or more arabinose, cumate, and salicylate inducible promoter(s) in vivo. In some embodiments, the promoter is directly or indirectly induced by a chemical and/or nutritional inducer and/or metabolite which is co-administered with the genetically engineered bacteria of the invention. In some embodiments, inducers are administered intraperitoneally at a defined time before bacterial injection into the tumor. In some embodiments, inducers are administered intraperitoneally at a defined time after bacterial injection into the tumor. In some embodiments, inducers are administered intraperitoneally concurrently with bacterial injection into the tumor. In some embodiments, inducers are administered intravenously at a defined time before bacterial injection into the tumor. In some embodiments, inducers are administered intravenously at a defined time after bacterial injection into the tumor. In some embodiments, inducers are administered intravenously concurrently with bacterial injection into the tumor. In some embodiments, inducers are administered subcutaneously at a defined time before bacterial injection into the tumor. In some embodiments, inducers are administered subcutaneously at a defined time after bacterial injection into the tumor. In some embodiments, inducers are administered subcutaneously concurrently with bacterial injection into the tumor.

[1018] In some embodiments, inducers are administered intratumorally at a defined time before bacterial injection into the tumor. In some embodiments, inducers are administered intratumorally at a defined time after bacterial injection into the tumor. In some embodiments, inducers are administered intratumorally concurrently with bacterial injection into the tumor. In some embodiments, inducers are administered intraperitoneally at a defined time before bacterial injection into the tumor. In some embodiments, inducers are administered intraperitoneally at a defined time after bacterial injection into the tumor. In some embodiments, inducers are administered intraperitoneally concurrently with intravenous bacterial administration. In some embodiments, inducers are administered intravenously at a defined time before bacterial injection into the tumor. In some embodiments, inducers are administered intravenously at a defined time after bacterial injection into the tumor. In some embodiments, inducers are administered intravenously concurrently with intravenous bacterial administration. In some embodiments, inducers are administered subcutaneously at a defined time before bacterial injection into the tumor. In some embodiments, inducers are administered subcutaneously at a defined time after bacterial injection into the tumor. In some embodiments, inducers are administered subcutaneously concurrently with intravenous bacterial administration. In some embodiments, inducers are administered intratumorally at a defined time before bacterial injection into the tumor. In some embodiments, inducers are administered intratumorally at a defined time after bacterial injection into the tumor. In some embodiments, inducers are administered intratumorally concurrently with intravenous bacterial administration.

[1019] In some embodiments, expression of one or more immune modulator(s) and/or other polypeptide(s) of interest, is driven directly or indirectly by one or more promoter(s) induced by a chemical and/or nutritional inducer and/or metabolite during in vitro growth, preparation, or manufacturing of the strain prior to in vivo administration. In some embodiments, the promoter(s) induced by a chemical and/or nutritional inducer and/or metabolite are induced in culture, e.g., grown in a flask, fermenter or other appropriate culture vessel, e.g., used during cell growth, cell expansion, fermentation, recovery, purification, formulation, and/or manufacture. In some embodiments, the promoter is directly or indirectly induced by a molecule that is added to in the bacterial culture to induce expression and pre-load the bacterium with one or more immune modulator(s) and/or other polypeptide(s) of interest prior to administration. In some embodiments, the cultures, which are induced by a chemical and/or nutritional inducer and/or metabolite, are grown aerobically. In some embodiments, the cultures, which are induced by a chemical and/or nutritional inducer and/or metabolite, are grown anaerobically.

[1020] In one embodiment, the gene encoding the effector or the immune modulator is operably linked to a promoter that is induced by salicylate or a derivative thereof. After over 100 years of clinical use, salicylate remains one of the world's most extensively used ‘over-the-counter’ drugs, and it is still recognized as the standard analgesic/antipyretic/anti-inflammatory agent by which newer drugs are assessed (Clissold; Salicylate and related derivatives of salicylic acid; Drugs. 1986; 32 Suppl 4:8-26). In an non-limiting example, the immune modulator is operably linked to a promoter PSal, as part of the salicylate PSal/NahR biosensor circuit (Part:BBa_J61051), originally adapted from Pseudomonas putida. The nahR gene was mined from the 83 kb naphthalene degradation plasmid NAH7 of Pseudomonas putida, encoding a 34 kDa protein which binds to nah and sal promoters to activate transcription in response to the inducer salicylate (Dunn, N. W., and I. C. Gunsalus (1973) Transmissible plasmid encoding early enzymes of naphthalene oxidation in Pseudomonas putida. J. Bacteriol. 114:974-979). In this system NahR is constitutively expressed by a constitutive promoter (Pc), and the expression of the protein of interest, e.g., the immune modulator is positively regulated by NahR in the presence of inducers (e.g., salicylate). Thus, in some embodiments, the genetically engineered bacteria comprise a gene sequence encoding an immune modulator which is operably linked to salicylate inducible promoter (e.g., PSal). In some embodiments, the genetically engineered bacteria further comprise gene sequence(s) encoding NahR, which are operably linked to a promoter. In some embodiments, NahR is under control of a constitutive promoter described herein or known in the art. In some embodiments, NahR is under control of an inducible promoter described herein or known in the art. In some embodiments described herein, the Biobrick BBa_J61051 (containing the gene encoding NahR driven by a constitutive promoter and the PSal promoter was cloned preceding dacA.

[1021] In one embodiment, expression of one or more immune modulator protein(s) of interest, e.g., one or more therapeutic polypeptide(s), is driven directly or indirectly by one or more salicylate inducible promoter(s).

[1022] In some embodiments, the salicylate inducible promoter is useful for or induced during in vivo expression of the one or more protein(s) of interest. In some embodiments, expression of one or more immune modulator protein(s) of interest is driven directly or indirectly by one or more salicylate inducible promoter(s) in vivo. In some embodiments, the promoter is directly or indirectly induced by a molecule that is co-administered with the genetically engineered bacteria of the invention, e.g., salicylate.

[1023] In some embodiments, salicylate is administered intraperitoneally at a defined time before bacterial injection into the tumor. In some embodiments, salicylate is administered intraperitoneally at a defined time after bacterial injection into the tumor. In some embodiments, salicylate is administered intraperitoneally concurrently with bacterial injection into the tumor. In some embodiments, salicylate is administered intravenously at a defined time before bacterial injection into the tumor. In some embodiments, salicylate is administered intravenously at a defined time after bacterial injection into the tumor. In some embodiments, salicylate is administered intravenously concurrently with bacterial injection into the tumor. In some embodiments, salicylate is administered subcutaneously at a defined time before bacterial injection into the tumor. In some embodiments, salicylate is administered subcutaneously at a defined time after bacterial injection into the tumor. In some embodiments, salicylate is administered subcutaneously concurrently with bacterial injection into the tumor.

[1024] In some embodiments, salicylate is administered intratumorally at a defined time before bacterial injection into the tumor. In some embodiments, salicylate is administered intratumorally at a defined time after bacterial injection into the tumor. In some embodiments, salicylate is administered intratumorally concurrently with bacterial injection into the tumor. In some embodiments, salicylate is administered intraperitoneally at a defined time before bacterial injection into the tumor. In some embodiments, salicylate is administered intraperitoneally at a defined time after bacterial injection into the tumor. In some embodiments, salicylate is administered intraperitoneally concurrently with intravenous bacterial administration. In some embodiments, salicylate is administered intravenously at a defined time before bacterial injection into the tumor. In some embodiments, salicylate is administered intravenously at a defined time after bacterial injection into the tumor. In some embodiments, salicylate is administered intravenously concurrently with intravenous bacterial administration. In some embodiments, salicylate is administered subcutaneously at a defined time before bacterial injection into the tumor. In some embodiments, salicylate is administered subcutaneously at a defined time after bacterial injection into the tumor. In some embodiments, salicylate is administered subcutaneously concurrently with intravenous bacterial administration. In some embodiments, salicylate is administered intratumorally at a defined time before bacterial injection into the tumor. In some embodiments, salicylate is administered intratumorally at a defined time after bacterial injection into the tumor. In some embodiments, salicylate is administered intratumorally concurrently with intravenous bacterial administration.

[1025] In some embodiments, expression of one or more protein(s) of interest, is driven directly or indirectly by one or more salicylate inducible promoter(s) during in vitro growth, preparation, or manufacturing of the strain prior to in vivo administration. In some embodiments, the salicylate inducible promoter(s) are induced in culture, e.g., grown in a flask, fermenter or other appropriate culture vessel, e.g., used during cell growth, cell expansion, fermentation, recovery, purification, formulation, and/or manufacture. In some embodiments, the promoter is directly or indirectly induced by a molecule that is added to in the bacterial culture to induce expression and pre-load the bacterium with the payload prior to administration, e.g., salicylate. In some embodiments, the cultures, which are induced by salicylate, are grown aerobically. In some embodiments, the cultures, which are induced by salicylate, are grown anaerobically.

[1026] In some embodiments, the salicylate inducible promoter drives the expression of one or more protein(s) of interest from a low-copy plasmid or a high copy plasmid or a biosafety system plasmid described herein. In some embodiments, the salicylate inducible promoter drives the expression of one or more protein(s) of interest from a construct which is integrated into the bacterial chromosome. Exemplary insertion sites are described herein.

[1027] In some embodiments, one or more protein(s) of interest are linked to and are driven by the native salicylate inducible promoter In some embodiments, the genetically engineered bacteria comprise one or more gene sequence(s) having at least 80%, 81%, 82%, 83%, 84%, 85%, 86%, 87%, 88%, 89%, 90%, 91%, 92%, 93%, 94%, 95%,96%, 97%, 98%, or 99% identity with SEQ ID NO: 1273 or SEQ ID NO: 1274.

[1028] In one embodiment, the genetically engineered bacteria comprise a gene sequence comprising SEQ ID NO: 1273 or SEQ ID NO: 1274. In another embodiment, the genetically engineered bacteria comprise a gene sequence which consists of SEQ ID NO: 1273 or SEQ ID NO: 1274.

[1029] In some embodiments, the salicylate inducible construct further comprises a gene encoding NahR, which in some embodiments is divergently transcribed from a constitutive or inducible promoter. In some embodiments, the genetically engineered bacteria comprise one or more gene sequence(s) having at least 80%, 81%, 82%, 83%, 84%, 85%, 86%, 87%, 88%, 89%, 90%, 91%, 92%, 93%, 94%, 95%,96%, 97%, 98%, or 99% identity with SEQ ID NO: 1278. In another embodiment, the genetically engineered bacteria comprise a gene sequence comprising SEQ ID NO: 1278. In another embodiment, the genetically engineered bacteria comprise a gene sequence which consists of SEQ ID NO: 1278.

[1030] In some embodiments, the genetically engineered bacteria comprise one or more gene sequence(s) encoding a polypeptide having at least 80%, 81%, 82%, 83%, 84%, 85%, 86%, 87%, 88%, 89%, 90%, 91%, 92%, 93%, 94%, 95%,96%, 97%, 98%, or 99% identity with the polypeptide encoded by SEQ ID NO: 1280. In another embodiment, the genetically engineered bacteria comprise a gene sequence encoding a polypeptide comprising SEQ ID NO: 1280. In yet another embodiment, the polypeptide expressed by the genetically engineered bacteria consists of SEQ ID NO: 1280.

[1031] In one embodiment, the gene encoding the immune modulator is operably linked to a promoter that is induced by cumate or a derivative thereof. Suitable derivatives are known in the art and are for example described in U.S. Pat. No. 7,745,592. Benefits of cumate induction include that Cumate is non-toxic, water-soluble and inexpensive. The basic mechanism by which the cumate-regulated expression functions in the native P. putida Fl and how it is applied to other bacterial chassis, including but not limited to, E. coli has been previously described (see e.g., Choi et al., Novel, Versatile, and Tightly

[1032] Regulated Expression System for Escherichia coli Strains; Appl. Environ. Microbiol. August 2010 vol. 76 no. 15 5058-5066). Essentially, the cumate circuit or switch includes four components: a strong promoter, a repressor-binding DNA sequence or operator, expression of cymR, a repressor, and cumate as the inducer. The addition of the inducer changes causes the formation of a complex between cumate and CymR and results in the removal of the repressor from its DNA binding site, allowing expression of the gene of interest. A construct comprising the cymR gene driven by a constitutive promoter and a cymR responsive promoter was cloned in front of the DacA gene to allow cumate inducible expression of DacA is described elsewhere herein.

[1033] In one embodiment, expression of one or more immune modulator protein(s) of interest, e.g., one or more therapeutic polypeptide(s), is driven directly or indirectly by one or more promoter(s) inducible by cumate or a derivative thereof.

[1034] In some embodiments, the cumate inducible promoter is useful for or induced during in vivo expression of the one or more protein(s) of interest. In some embodiments, expression of one or more immune modulator protein(s) of interest is driven directly or indirectly by one or more cumate inducible promoter(s) in vivo. In some embodiments, the promoter is directly or indirectly induced by a molecule that is co-administered with the genetically engineered bacteria of the invention, e.g., cumate.

[1035] In some embodiments, cumate is administered intraperitoneally at a defined time before bacterial injection into the tumor. In some embodiments, cumate is administered intraperitoneally at a defined time after bacterial injection into the tumor. In some embodiments, cumate is administered intraperitoneally concurrently with bacterial injection into the tumor. In some embodiments, cumate is administered intravenously at a defined time before bacterial injection into the tumor. In some embodiments, cumate is administered intravenously at a defined time after bacterial injection into the tumor. In some embodiments, cumate is administered intravenously concurrently with bacterial injection into the tumor. In some embodiments, cumate is administered subcutaneously at a defined time before bacterial injection into the tumor. In some embodiments, cumate is administered subcutaneously at a defined time after bacterial injection into the tumor. In some embodiments, cumate is administered subcutaneously concurrently with bacterial injection into the tumor.

[1036] In some embodiments, cumate is administered intratumorally at a defined time before bacterial injection into the tumor. In some embodiments, cumate is administered intratumorally at a defined time after bacterial injection into the tumor. In some embodiments, cumate is administered intratumorally concurrently with bacterial injection into the tumor. In some embodiments, cumate is administered intraperitoneally at a defined time before bacterial injection into the tumor. In some embodiments, cumate is administered intraperitoneally at a defined time after bacterial injection into the tumor. In some embodiments, cumate is administered intraperitoneally concurrently with intravenous bacterial administration. In some embodiments, cumate is administered intravenously at a defined time before bacterial injection into the tumor. In some embodiments, cumate is administered intravenously at a defined time after bacterial injection into the tumor. In some embodiments, cumate is administered intravenously concurrently with intravenous bacterial administration. In some embodiments, cumate is administered subcutaneously at a defined time before bacterial injection into the tumor. In some embodiments, cumate is administered subcutaneously at a defined time after bacterial injection into the tumor. In some embodiments, cumate is administered subcutaneously concurrently with intravenous bacterial administration. In some embodiments, cumate is administered intratumorally at a defined time before bacterial injection into the tumor. In some embodiments, cumate is administered intratumorally at a defined time after bacterial injection into the tumor. In some embodiments, cumate is administered intratumorally concurrently with intravenous bacterial administration.

[1037] In some embodiments, expression of one or more protein(s) of interest, is driven directly or indirectly by one or more cumate inducible promoter(s) during in vitro growth, preparation, or manufacturing of the strain prior to in vivo administration. In some embodiments, the cumate inducible promoter(s) are induced in culture, e.g., grown in a flask, fermenter or other appropriate culture vessel, e.g., used during cell growth, cell expansion, fermentation, recovery, purification, formulation, and/or manufacture. In some embodiments, the promoter is directly or indirectly induced by a molecule that is added to in the bacterial culture to induce expression and pre-load the bacterium with the payload prior to administration, e.g., cumate. In some embodiments, the cultures, which are induced by cumate, are grown aerobically. In some embodiments, the cultures, which are induced by cumate, are grown anaerobically.

[1038] In some embodiments, the cumate inducible promoter drives the expression of one or more protein(s) of interest from a low-copy plasmid or a high copy plasmid or a biosafety system plasmid described herein. In some embodiments, the cumate inducible promoter drives the expression of one or more protein(s) of interest from a construct which is integrated into the bacterial chromosome. Exemplary insertion sites are described herein.

[1039] In some embodiments, one or more protein(s) of interest are operably linked to by the native cumate inducible promoter. In some embodiments, the genetically engineered bacteria comprise one or more gene sequence(s) having at least 80%, 81%, 82%, 83%, 84%, 85%, 86%, 87%, 88%, 89%, 90%, 91%, 92%, 93%, 94%, 95%,96%, 97%, 98%, or 99% identity with SEQ ID NO: 1270 or SEQ ID NO: 1271.

[1040] In one embodiment, the genetically engineered bacteria comprise a gene sequence comprising SEQ ID NO: 1270 or SEQ ID NO: 1271. In another embodiment, the genetically engineered bacteria comprise a gene sequence which consists of SEQ ID NO: 1270 or SEQ ID NO: 1271

[1041] In some embodiments, the cumate inducible construct further comprises a gene encoding CymR, which in some embodiments is divergently transcribed from a constitutive or inducible promoter. In some embodiments, the genetically engineered bacteria comprise one or more gene sequence(s) having at least 80%, 81%, 82%, 83%, 84%, 85%, 86%, 87%, 88%, 89%, 90%, 91%, 92%, 93%, 94%, 95%,96%, 97%, 98%, or 99% identity with SEQ ID NO: 1268. In another embodiment, the genetically engineered bacteria comprise a gene sequence comprising SEQ ID NO: 1268. In another embodiment, the genetically engineered bacteria comprise a gene sequence which consists of SEQ ID NO: 1268.

[1042] In some embodiments, the genetically engineered bacteria comprise one or more gene sequence(s) encoding a polypeptide having at least 80%, 81%, 82%, 83%, 84%, 85%, 86%, 87%, 88%, 89%, 90%, 91%, 92%, 93%, 94%, 95%,96%, 97%, 98%, or 99% identity with the polypeptide encoded by SEQ ID NO: 1269. In another embodiment, the genetically engineered bacteria comprise a gene sequence encoding a polypeptide comprising SEQ ID NO: 1269. In yet another embodiment, the polypeptide expressed by the genetically engineered bacteria consists of SEQ ID NO: 1269.

[1043] Other inducible promoters contemplated in the disclosure are described in are described in International Patent Application PCT/US2017/013072, filed Jan. 11, 2017, published as WO2017/123675, the contents of which is herein incorporated by reference in its entirety. Such promoters include arabinose inducible, rhamnose inducible, and IPTG inducible promoters, tetracycline inducible promoters, temperature inducible promoters, and PSSB promoter. These promoters can be used in combination with each other or with other inducible promoters, such as low oxygen inducible promoters, or constitutive promoters to fine tune expression of different effectors, e.g., in one bacterium or in a composition of more than one strain of bacteria.

### Constitutive Promoters

[1044] In some embodiments, the gene encoding the payload is present on a plasmid and operably linked to a constitutive promoter. In some embodiments, the gene encoding the payload is present on a chromosome and operably linked to a constitutive promoter.

[1045] In some embodiments, the constitutive promoter is active under in vivo conditions, e.g., the gut and/or conditions of the tumor microenvironment, as described herein. In some embodiments, the promoters is active under in vitro conditions, e.g., various cell culture and/or cell manufacturing conditions, as described herein. In some embodiments, the constitutive promoter is active under in vivo conditions, e.g., the gut and/or conditions of the tumor microenvironment, as described herein, and under in vitro conditions, e.g., various cell culture and/or cell production and/or manufacturing conditions, as described herein.

[1046] In some embodiments, the constitutive promoter that is operably linked to the gene encoding the payload is active in various exogenous environmental conditions (e.g., in vivo and/or in vitro and/or production/manufacturing conditions).

[1047] In some embodiments, the constitutive promoter is active in exogenous environmental conditions specific to the gut of a mammal and/or conditions of the tumor microenvironment. In some embodiments, the constitutive promoter is active in exogenous environmental conditions specific to the small intestine of a mammal. In some embodiments, the constitutive promoter is active in low-oxygen or anaerobic conditions such as the environment of the mammalian gut and/or conditions of the tumor microenvironment. In some embodiments, the constitutive promoter is active in the presence of molecules or metabolites that are specific to the gut of a mammal and/or conditions of the tumor microenvironment. In some embodiments, the constitutive promoter is directly or indirectly induced by a molecule that is co-administered with the bacterial cell. In some embodiments, the constitutive promoter is active in the presence of molecules or metabolites or other conditions, that are present during in vitro culture, cell production and/or manufacturing conditions. Bacterial constitutive promoters are known in the art and are described in are described in International Patent Application PCT/US2017/013072, filed Jan. 11, 2017, published as WO2017/123675, the contents of which is herein incorporated by reference in its entirety. Examples are included herein in SEQ ID NO: 598-739 and a subset is shown in Table 11.

TABLE 11
Promoters

| | | SEQ |
|---|---|---|
| | | ID |
| Name | Description | NO |
| Plpp | The Plpp promoter is a natural | 740 |
| | promoter taken from the Nissle | |
| | genome. In situ it is used to | |
| | drive production of lpp, which | |
| | is known to be the most | |
| | abundant protein in the cell. | |
| | Also, in some previous RNAseq | |
| | experiments I was able to | |
| | confirm that the lpp mRNA is | |
| | one of the most abundant mRNA | |
| | in Nissle during exponential | |
| | growth. | |
| PapFAB46 | See, e.g., Kosuri, S., Goodman, | 741 |
| | D. B. & Cambray, G. | |
| | Composability of regulatory | |
| | sequences controlling | |
| | transcription and translation | |
| | in Escherichia coli. in 1-20 | |
| | (2013). doi: 10.1073/pnas. | |
| PJ23101 + | UP element helps recruit | 742 |
| UP element | RNA polymerase | |
| | (ggaaaatttttttaaaaaaaaaac | |
| | (SEQ ID NO: 1250)) | |
| PJ23107 + | UP element helps recruit | 743 |
| UP element | RNA polymerase | |
| | (ggaaaatttttttaaaaaaaaaac | |
| | (SEQ ID NO: 1250)) | |
| PSYN23119 | UP element at 5′ end; consensus | 744 |
| | -10 region is TATAAT; the | |
| | consensus -35 is TTGACA; the | |
| | extended -10 region is | |
| | generally TGNTATAAT (TGGTATAAT | |
| | in this sequence | |

[1048] In some embodiments, the promoter is Plpp or a derivative thereof. In some embodiments, the promoter comprises a sequence from SEQ ID NO:740. In some embodiments, the constitutive promoter is at least about 80%, at least about 85%, at least about 90%, at least about 95%, or at least about 99% homologous to the sequence of SEQ ID NO: 740. In some embodiments, the promoter is PapFAB46 or a derivative thereof. In some embodiments, the promoter comprises a sequence from SEQ ID NO:741. In some embodiments, the constitutive promoter is at least about 80%, at least about 85%, at least about 90%, at least about 95%, or at least about 99% homologous to the sequence of SEQ ID NO: 741. In some embodiments, the promoter is PJ23101+UP element or a derivative thereof. In some embodiments, the promoter comprises a sequence from SEQ ID NO:742. In some embodiments, the constitutive promoter is at least about 80%, at least about 85%, at least about 90%, at least about 95%, or at least about 99% homologous to the sequence of SEQ ID NO: 742. In some embodiments, the promoter is PJ23107+UP element or a derivative thereof. In some embodiments, the promoter comprises a sequence from SEQ ID NO:743. In some embodiments, the constitutive promoter is at least about 80%, at least about 85%, at least about 90%, at least about 95%, or at least about 99% homologous to the sequence of SEQ ID NO: 743. In some embodiments, the promoter is PSYN23119 or a derivative thereof. In some embodiments, the promoter comprises a sequence from SEQ ID NO:744. In some embodiments, the constitutive promoter is at least about 80%, at least about 85%, at least about 90%, at least about 95%, or at least about 99% homologous to the sequence of SEQ ID NO: 744.

[1049] Additional promoters which may be linked to the payload include apFAB124 (tcgacatttatcccttgcggcgaatacttacagccatagcaa (SEQ ID NO: 1443)); apfab338(GGCGCGCC TTGACAATTAATCATCCGGCTCCTAGGATGTGTGGAGGGAC (SEQ ID NO: 1444)), apFAB66 (GGCGCGCC TTGACATCAGGAAAATTTTTCTGTATAATAGATTCATCTCAA (SEQ ID NO: 1445)), and apFAB54 (GGCGCGCC TTGACATAAAGTCTAACCTATAGGATACTTACAGCCATACAAG (SEQ ID NO: 1446)). In some embodiments, the promoter is apFAB124 or a derivative thereof. In some embodiments, the promoter comprises a sequence of apFAB124. In some embodiments, the constitutive promoter is at least about 80%, at least about 85%, at least about 90%, at least about 95%, or at least about 99% homologous to the sequence of apFAB124. In some embodiments, the promoter is apFAB338 or a derivative thereof. In some embodiments, the promoter comprises a sequence of apFAB338. In some embodiments, the constitutive promoter is at least about 80%, at least about 85%, at least about 90%, at least about 95%, or at least about 99% homologous to the sequence of apFAB338. In some embodiments, the promoter is apFAB66 or a derivative thereof. In some embodiments, the promoter comprises a sequence of apFAB66. In some embodiments, the constitutive promoter is at least about 80%, at least about 85%, at least about 90%, at least about 95%, or at least about 99% homologous to the sequence of apFAB66. In some embodiments, the promoter is apFAB54 or a derivative thereof. In some embodiments, the promoter comprises a sequence of apFAB54. In some embodiments, the constitutive promoter is at least about 80%, at least about 85%, at least about 90%, at least about 95%, or at least about 99% homologous to the sequence of apFAB54.

### Ribosome Binding Sites

[1050] In some embodiments, ribosome binding sites are added, switched out or replaced. By testing a few ribosome binding sites, expression levels can be fine-tuned to the desired level. In some embodiments, RBS which are suitable for prokaryotic expression and can be used to achieve the desired expression levels are selected. Non-limiting examples of RBS are listed at Registry of standard biological parts and are described in are described in International Patent Application PCT/US2017/013072, filed Jan. 11, 2017, published as WO2017/123675, the contents of which is herein incorporated by reference in its entirety. Suitable examples are shown in SEQ ID NO: 1018-1050 and 869-871, 873-877, 880-887.

### Induction of Payloads During Strain Culture

[1051] Induction of payloads during culture is described in International Patent Application PCT/US2017/013072, filed Jan. 11, 2017, published as WO2017/123675, the contents of which is herein incorporated by reference in its entirety.

[1052] In some embodiments, it is desirable to pre-induce payload or protein of interest expression and/or payload activity prior to administration. Such payload or protein of interest may be an effector intended for secretion or may be an enzyme which catalyzes a metabolic reaction to produce an effector. In other embodiments, the protein of interest is an enzyme which catabolizes a harmful metabolite. In such situations, the strains are pre-loaded with active payload or protein of interest. In such instances, the genetically engineered bacteria of the invention express one or more protein(s) of interest, under conditions provided in bacterial culture during cell growth, expansion, purification, fermentation, and/or manufacture prior to administration in vivo. Such culture conditions can be provided in a flask, fermenter or other appropriate culture vessel, e.g., used during cell growth, cell expansion, fermentation, recovery, purification, formulation, and/or manufacture. As used herein, the term “bacterial culture” or bacterial cell culture” or “culture” refers to bacterial cells or microorganisms, which are maintained or grown in vitro during several production processes, including cell growth, cell expansion, recovery, purification, fermentation, and/or manufacture. As used herein, the term “fermentation” refers to the growth, expansion, and maintenance of bacteria under defined conditions. Fermentation may occur under a number of cell culture conditions, including anaerobic or low oxygen or oxygenated conditions, in the presence of inducers, nutrients, at defined temperatures, and the like.

[1053] Culture conditions are selected to achieve optimal activity and viability of the cells, while maintaining a high cell density (high biomass) yield. A number of cell culture conditions and operating parameters are monitored and adjusted to achieve optimal activity, high yield and high viability, including oxygen levels (e.g., low oxygen, microaerobic, aerobic), temperature of the medium, and nutrients and/or different growth media, chemical and/or nutritional inducers and other components provided in the medium.

[1054] In some embodiments, the one or more protein(s) of interest and are directly or indirectly induced, while the strains is grown up for in vivo administration. Without wishing to be bound by theory, pre-induction may boost in vivo activity, e.g., in the gut or a tumor. If the bacterial residence time in a particular gut compartment is relatively short, the bacteria may pass through the small intestine without reaching full in vivo induction capacity. In contrast, if a strain is pre-induced and preloaded, the strains are already fully active, allowing for greater activity more quickly as the bacteria reach the intestine. Ergo, no transit time is “wasted”, in which the strain is not optimally active. As the bacteria continue to move through the intestine, in vivo induction occurs under environmental conditions of the gut (e.g., low oxygen, or in the presence of gut metabolites). Similarly, systemic administration or intratumor injection, as described herein, of other bacterium may allow for greater activity more quickly as the bacteria reach the tumor. Once in the tumor, in vivo induction occurs, e.g., under conditions of the tumor microenvironment.

[1055] In one embodiment, expression of one or more payload(s), is induced during cell growth, cell expansion, fermentation, recovery, purification, formulation, and/or manufacture. In one embodiment, expression of several different proteins of interest is induced during cell growth, cell expansion, fermentation, recovery, purification, formulation, and/or manufacture.

[1056] In some embodiments, the strains are administered without any pre-induction protocols during strain growth prior to in vivo administration.

### Anaerobic Induction

[1057] In some embodiments, cells are induced under anaerobic or low oxygen conditions in culture. In such instances, cells are grown (e.g., for 1.5 to 3 hours) until they have reached a certain OD, e.g., ODs within the range of 0.1 to 10, indicating a certain density e.g., ranging from 1×10\hat{ }8 to 1×10\hat{ }11, and exponential growth and are then switched to anaerobic or low oxygen conditions for approximately 3 to 5 hours. In some embodiments, strains are induced under anaerobic or low oxygen conditions, e.g. to induce FNR promoter activity and drive expression of one or more payload(s) and/or transporters under the control of one or more FNR promoters.

[1058] In one embodiment, expression of one or more payload(s), is under the control of one or more FNR promoter(s) and is induced during cell growth, cell expansion, fermentation, recovery, purification, formulation, and/or manufacture under anaerobic or low oxygen conditions. In one embodiment, expression of several different proteins of interest is under the control of one or more FNR promoter(s) and is induced during cell growth, cell expansion, fermentation, recovery, purification, formulation, and/or manufacture under anaerobic or low oxygen conditions.

[1059] Without wishing to be bound by theory, strains that comprise one or more payload(s) under the control of an FNR promoter, may allow expression of payload(s) from these promoters in vitro, under anaerobic or low oxygen culture conditions, and in vivo, under the low oxygen conditions found in the gut and/or conditions of the tumor microenvironment.

[1060] In some embodiments, promoters linked to the payload of interest may be inducible by arabinose, cumate, and salicylate, IPTG, rhamnose, tetracycline, and/or other chemical and/or nutritional inducers can be induced under anaerobic or low oxygen conditions in the presence of the chemical and/or nutritional inducer. In particular, strains may comprise a combination of gene sequence(s), some of which are under control of FNR promoters and others which are under control of promoters induced by chemical and/or nutritional inducers. In some embodiments, strains may comprise one or more payload gene sequence(s) and/or under the control of one or more FNR promoter(s), and one or more payload gene sequence(s) under the control of a one or more constitutive promoter(s) described herein.

### Aerobic Induction

[1061] In some embodiments, it is desirable to prepare, pre-load and pre-induce the strains under aerobic conditions. This allows more efficient growth and viability, and, in some cases, reduces the build-up of toxic metabolites. In such instances, cells are grown (e.g., for 1.5 to 3 hours) until they have reached a certain OD, e.g., ODs within the range of 0.1 to 10, indicating a certain density e.g., ranging from 1×10\hat{ }8 to 1×10\hat{ }11, and exponential growth and are then induced through the addition of the inducer or through other means, such as shift to a permissive temperature, for approximately 3 to 5 hours.

[1062] In some embodiments, promoters inducible by arabinose, cumate, and salicylate, IPTG, rhamnose, tetracycline, and/or other chemical and/or nutritional inducers described herein or known in the art can be induced under aerobic conditions in the presence of the chemical and/or nutritional inducer during cell growth, cell expansion, fermentation, recovery, purification, formulation, and/or manufacture. In one embodiment, expression of one or more payload(s) is under the control of one or more promoter(s) regulated by chemical and/or nutritional inducers and is induced during cell growth, cell expansion, fermentation, recovery, purification, formulation, and/or manufacture under aerobic conditions.

[1063] In some embodiments, genetically engineered strains comprise gene sequence(s) which are induced under aerobic culture conditions. In some embodiments, these strains further comprise FNR inducible gene sequence(s) for in vivo activation in the gut and/or conditions of the tumor microenvironment. In some embodiments, these strains do not further comprise FNR inducible gene sequence(s) for in vivo activation in the gut and/or conditions of the tumor microenvironment.

### Microaerobic Induction

[1064] In some embodiments, viability, growth, and activity are optimized by pre-inducing the bacterial strain under microaerobic conditions. In some embodiments, microaerobic conditions are best suited to “strike a balance” between optimal growth, activity and viability conditions and optimal conditions for induction; in particular, if the expression of the one or more payload(s) are driven by an anaerobic and/or low oxygen promoter, e.g., a FNR promoter. In such instances, cells are for example grown (e.g., for 1.5 to 3 hours) until they have reached a certain OD, e.g., ODs within the range of 0.1 to 10, indicating a certain density e.g., ranging from 1×10\hat{ }8 to 1×10\hat{ }11, and exponential growth and are then induced through the addition of the inducer or through other means, such as shift to at a permissive temperature, for approximately 3 to 5 hours.

[1065] In one embodiment, expression of one or more payload(s) is under the control of one or more FNR promoter(s) and is induced during cell growth, cell expansion, fermentation, recovery, purification, formulation, and/or manufacture under microaerobic conditions.

[1066] Without wishing to be bound by theory, strains that comprise one or more payload(s) under the control of an FNR promoter, may allow expression of payload(s) from these promoters in vitro, under microaerobic culture conditions, and in vivo, under the low oxygen conditions found in the gut and/or conditions of the tumor microenvironment.

[1067] In some embodiments, promoters inducible by arabinose, cumate, and salicylate, IPTG, rhamnose, tetracycline, and/or other chemical and/or nutritional inducers can be induced under microaerobic conditions in the presence of the chemical and/or nutritional inducer. In particular, strains may comprise a combination of gene sequence(s), some of which are under control of FNR promoters and others which are under control of promoters induced by chemical and/or nutritional inducers. In some embodiments, strains may comprise one or more payload gene sequence(s) under the control of one or more FNR promoter(s), and one or more payload gene sequence(s) under the control of a one or more constitutive promoter(s) described herein.

[1068] In one embodiment, expression of one or more payload(s) is under the control of one or more promoter(s) regulated by chemical and/or nutritional inducers and is induced during cell growth, cell expansion, fermentation, recovery, purification, formulation, and/or manufacture under microaerobic conditions.

Induction of Strains Using Phasing, Pulsing and/or Cycling

[1069] In some embodiments, cycling, phasing, or pulsing techniques are employed during cell growth, expansion, recovery, purification, fermentation, and/or manufacture to efficiently induce and grow the strains prior to in vivo administration. This method is used to “strike a balance” between optimal growth, activity, cell health, and viability conditions and optimal conditions for induction; in particular, if growth, cell health or viability are negatively affected under inducing conditions. In such instances, cells are grown (e.g., for 1.5 to 3 hours) in a first phase or cycle until they have reached a certain OD, e.g., ODs within the range of 0.1 to 10, indicating a certain density e.g., ranging from 1×10\hat{ }8 to 1×10\hat{ }11, and are then induced through the addition of the inducer or through other means, such as shift to a permissive temperature (if a promoter is thermoregulated), or change in oxygen levels (e.g., reduction of oxygen level in the case of induction of an FNR promoter driven construct) for approximately 3 to 5 hours. In a second phase or cycle, conditions are brought back to the original conditions which support optimal growth, cell health and viability. Alternatively, if a chemical and/or nutritional inducer is used, then the culture can be spiked with a second dose of the inducer in the second phase or cycle.

[1070] In some embodiments, two cycles of optimal conditions and inducing conditions are employed (i.e., growth, induction, recovery and growth, induction). In some embodiments, three cycles of optimal conditions and inducing conditions are employed. In some embodiments, four or more cycles of optimal conditions and inducing conditions are employed. In a non-liming example, such cycling and/or phasing is used for induction under anaerobic and/or low oxygen conditions (e.g., induction of FNR promoters). In one embodiment, cells are grown to the optimal density and then induced under anaerobic and/or low oxygen conditions. Before growth and/or viability are negatively impacted due to stressful induction conditions, cells are returned to oxygenated conditions to recover, after which they are then returned to inducing anaerobic and/or low oxygen conditions for a second time. In some embodiments, these cycles are repeated as needed.

[1071] In some embodiments, growing cultures are spiked once with the chemical and/or nutritional inducer. In some embodiments, growing cultures are spiked twice with the chemical and/or nutritional inducer. In some embodiments, growing cultures are spiked three or more times with the chemical and/or nutritional inducer. In a non-limiting example, cells are first grown under optimal growth conditions up to a certain density, e.g., for 1.5 to 3 hour) to reach an of 0.1 to 10, until the cells are at a density ranging from 1×10\hat{ }8 to 1×10\hat{ }11. Then the chemical inducer, e.g., arabinose, cumate, and salicylate or IPTG, is added to the culture. After 3 to 5 hours, an additional dose of the inducer is added to re-initiate the induction. Spiking can be repeated as needed.

[1072] In some embodiments, payload(s) induced during cell growth, cell expansion, fermentation, recovery, purification, formulation, and/or manufacture by using phasing or cycling or pulsing or spiking techniques are under the control of different inducible promoters, for example two different chemical inducers. In other embodiments, the payload is induced under low oxygen conditions or microaerobic conditions and a second payload is induced by a chemical inducer.

### Nucleic Acids

[1073] In some embodiments, the disclosure provides novel nucleic acids for producing one or more immune initiators and/or immune sustainers. In some embodiments, the nucleic acid encodes one or more immune initiator and/or immune sustainer polypeptides. Thus, in some embodiments, the nucleic acid comprises gene sequence(s) encoding one or more immune initiator and/or immune sustainer polypeptides.

[1074] In some embodiments, the disclosure provides novel nucleic acids for producing one or more STING agonist(s). In some embodiments, the nucleic acid encodes one or more STING agonist producing polypeptides. Thus, in some embodiments, the nucleic acid comprises gene sequence(s) encoding one or more STING agonist producing polypeptides.

[1075] In some embodiments, the disclosure provides novel nucleic acids for producing c-diAMP. In some embodiments, the nucleic acid encodes one or more c-diAMP producing polypeptides. Thus, in some embodiments, the nucleic acid comprises gene sequence(s) encoding one or more cyclic diadenylate cyclase polypeptides. In some embodiments, the nucleic acid comprises gene sequence encoding a DacA polypeptide. In certain embodiments, the DacA polypeptide has at least about 80% identity with SEQ ID NO: 1257. In certain embodiments, the DacA polypeptide has at least about 90% identity with SEQ ID NO: 1257. In certain embodiments, the DacA polypeptide has at least about 95% identity with SEQ ID NO: 1257. In some embodiments, the DacA polypeptide has at least about 85%, 86%, 87%, 88%, 89%, 90%, 91%, 92%, 93%, 94%, 95%, 96%, 97%, 98%, or 99% identity with SEQ ID NO: 1257. In some specific embodiments, the DacA polypeptide comprises SEQ ID NO: 1257. In other specific embodiments, the DacA polypeptide consists of SEQ ID NO: 1257. In some embodiments, the nucleic acid comprises a dacA gene sequence. In certain embodiments, the nucleic acid comprising the dacA gene sequence has at least about 80% identity with SEQ ID NO: 1258. In certain embodiments, the nucleic acid comprising the dacA gene sequence has at least about 90% identity with SEQ ID NO: 1258. In certain embodiments, the nucleic acid comprising the dacA gene sequence has at least about 95% identity with SEQ ID NO: 1258. In some embodiments, the nucleic acid comprising the dacA gene sequence has at least about 85%, 86%, 87%, 88%, 89%, 90%, 91%, 92%, 93%, 94%, 95%, 96%, 97%, 98%, or 99% identity with SEQ ID NO: 1258. In some specific embodiments, the nucleic acid comprising the dacA gene sequence comprises SEQ ID NO: 1258. In other specific embodiments the nucleic acid comprising the dacA gene sequence consists of SEQ ID NO: 1258.

[1076] In certain embodiments, the nucleic acid comprising the dacA gene sequence is operably linked to a low oxygen inducible promoter. In certain embodiments, the nucleic acid comprising the dacA gene sequence is operably linked to a low oxygen inducible promoter and has at least about 80% identity with SEQ ID NO: 1284. In certain embodiments, the nucleic acid comprising the dacA gene sequence operably linked to a low oxygen inducible promoter has at least about 90% identity with SEQ ID NO: 1284. In certain embodiments, the nucleic acid comprising the dacA gene sequence operably linked to a low oxygen inducible promoter has at least about 95% identity with SEQ ID NO: 1284. In some embodiments, the nucleic acid comprising the dacA gene sequence operably linked to a low oxygen inducible promoter has at least about 85%, 86%, 87%, 88%, 89%, 90%, 91%, 92%, 93%, 94%, 95%, 96%, 97%, 98%, or 99% identity with SEQ ID NO: 1284. In some specific embodiments, the nucleic acid comprising the dacA gene sequence operably linked to a low oxygen inducible promoter comprises SEQ ID NO: 1284. In other specific embodiments the nucleic acid comprising the dacA gene sequence operably linked to a low oxygen inducible promoter consists of SEQ ID NO: 1284.

[1077] In some embodiments, the disclosure provides novel nucleic acids for producing c-GAMP. In some embodiments, the nucleic acid encodes one or more c-GAMP producing polypeptides. Thus, in some embodiments, the nucleic acid comprises gene sequence(s) encoding one or more cyclic c-GAMP synthase (cGAS) polypeptides. In some embodiments, the nucleic acid comprises gene sequence encoding a GAMP synthase polypeptide. In some embodiments, the nucleic acid comprises gene sequence encoding a human GAMP synthase polypeptide. In some embodiments, the nucleic acid comprises gene sequence encoding a GAMP synthase polypeptide from Verminephrobacter eiseniae. In some embodiments, the nucleic acid comprises gene sequence encoding a GAMP synthase polypeptide Kingella denitrificans (ATCC 33394). In some embodiments, the nucleic acid comprises gene sequence encoding a GAMP synthase polypeptide Neisseria bacilliformis (ATCC BAA-1200). In certain embodiments, the cGAS polypeptide has at least about 80% identity with a sequence selected from SEQ ID NO: 1254, 1260, 1261, and 1262. In certain embodiments, the cGAS polypeptide has at least about 90% identity with a sequence selected from SEQ ID NO: 1254, 1260, 1261, and 1262. In certain embodiments, the cGAS polypeptide has at least about 95% identity with a sequence selected from SEQ ID NO: 1254, 1260, 1261, and 1262. In some embodiments, the cGAS polypeptide has at least about 85%, 86%, 87%, 88%, 89%, 90%, 91%, 92%, 93%, 94%, 95%, 96%, 97%, 98%, or 99% identity with a sequence selected from SEQ ID NO: 1254, 1260, 1261, and 1262. In some specific embodiments, the cGAS polypeptide comprises a sequence selected from SEQ ID NO: 1254, 1260, 1261, and 1262. In other specific embodiments, the cGAS polypeptide consists of a sequence selected from SEQ ID NO: 1254, 1260, 1261, and 1262. In some embodiments, the nucleic acid comprises a cGAS gene sequence. In certain embodiments, the nucleic acid comprising the cGAS gene sequence has at least about 80% identity with a sequence selected from SEQ ID NO: 1255, 1263, 1264, and 1265. In certain embodiments, the nucleic acid comprising the cGAS gene sequence has at least about 90% identity with a sequence selected from SEQ ID NO: 1255, 1263, 1264, and 1265. In certain embodiments, the nucleic acid comprising the cGAS gene sequence has at least about 95% identity with a sequence selected from SEQ ID NO: 1255, 1263, 1264, and 1265. In some embodiments, the nucleic acid comprising the cGAS gene sequence has at least about 85%, 86%, 87%, 88%, 89%, 90%, 91%, 92%, 93%, 94%, 95%, 96%, 97%, 98%, or 99% identity with a sequence selected from SEQ ID NO: 1255, 1263, 1264, and 1265. In some specific embodiments, the nucleic acid comprising the cGAS gene sequence comprises a sequence selected from SEQ ID NO: 1255, 1263, 1264, and 1265. In other specific embodiments the nucleic acid comprising the cGAS gene sequence consists of a sequence selected from SEQ ID NO: 1255, 1263, 1264, and 1265.

[1078] In some embodiments, the disclosure provides novel nucleic acids for depleting kynurenine. In some embodiments, the nucleic acid comprises gene sequence encoding one or more kynurenine depleting enzymes. In one of the nucleic acid embodiments described herein, the nucleic acid sequence encoding the kynurenine catabolism enzyme comprises kynU (Pseudomonas). Accordingly, in one embodiment, the nucleic acid sequence comprising the kynU gene has at least about 80% identity with SEQ ID NO: 68. In one embodiment, the nucleic acid sequence comprising the kynU gene has at least about 90% identity with SEQ ID NO: 68. In another embodiment, the nucleic acid sequence comprising the kynU gene has at least about 95% identity with SEQ ID NO: 68. Accordingly, in one embodiment, the nucleic acid sequence comprising the kynU gene has at least about 85%, 86%, 87%, 88%, 89%, 90%, 91%, 92%, 93%, 94%, 95%, 96%, 97%, 98%, or 99% identity with SEQ ID NO: 68. In another embodiment, the nucleic acid sequence comprising the kynU gene comprises SEQ ID NO: 68. In yet another embodiment, the nucleic acid sequence comprising the kynU gene consists of SEQ ID NO: 68.

[1079] In one of the nucleic acid embodiments described herein, the kynurenine degradation enzyme comprises Kynureninase (Pseudomonase fluorescens). In one embodiment, the nucleic acid sequence encodes a polypeptide, which has at least about 80% identity with SEQ ID NO: 65. In one embodiment, the nucleic acid sequence encodes a polypeptide, which has at least about 90% identity with SEQ ID NO: 65. In another embodiment, the nucleic acid sequence encodes a polypeptide, which has at least about 95% identity with SEQ ID NO: 65. Accordingly, in one embodiment, the nucleic acid sequence encodes a polypeptide, which has at least about 85%, 86%, 87%, 88%, 89%, 90%, 91%, 92%, 93%, 94%, 95%, 96%, 97%, 98%, or 99% identity with SEQ ID NO: 65. In another embodiment, the nucleic acid sequence encodes a polypeptide, which comprises a sequence which encodes SEQ ID NO: 65. In yet another embodiment, the nucleic acid sequence encodes a polypeptide, which consists of a sequence which encodes SEQ ID NO: 65.

[1080] In some embodiments, the disclosure provides novel nucleic acids for consuming kynurenine. In some embodiments, the nucleic acid encodes one or more kynurenine consuming polypeptides. Thus, in some embodiments, the nucleic acid comprises gene sequence(s) encoding one or more kynurenine consuming polypeptides.

[1081] In some embodiments, the disclosure provides novel nucleic acids for consuming kynurenine. In some embodiments, the nucleic acid encodes one or more kynurenine consuming polypeptides. Thus, in some embodiments, the nucleic acid comprises gene sequence(s) encoding one or more kynureninase polypeptides. In some embodiments, the nucleic acid comprises gene sequence encoding a kynureninase polypeptide, e.g., from Pseudomonas fluorescens. In certain embodiments, the kynureninase polypeptide has at least about 80% identity with SEQ ID NO: 65. In certain embodiments, the kynureninase polypeptide has at least about 90% identity with SEQ ID NO: 65. In certain embodiments, the kynureninase polypeptide has at least about 95% identity with SEQ ID NO: 65. In some embodiments, the kynureninase polypeptide has at least about 85%, 86%, 87%, 88%, 89%, 90%, 91%, 92%, 93%, 94%, 95%, 96%, 97%, 98%, or 99% identity with SEQ ID NO: 65. In some specific embodiments, the kynureninase polypeptide comprises SEQ ID NO: 65. In other specific embodiments, the kynureninase polypeptide consists of SEQ ID NO: 65. In some embodiments, the nucleic acid comprises a kyn gene sequence. In certain embodiments, the nucleic acid comprising the kyn gene sequence has at least about 80% identity with SEQ ID NO: 68. In certain embodiments, the nucleic acid comprising the kyn gene sequence has at least about 90% identity with SEQ ID NO: 68. In certain embodiments, the nucleic acid comprising the kyn gene sequence has at least about 95% identity with SEQ ID NO: 68. In some embodiments, the nucleic acid comprising the kyn gene sequence has at least about 85%, 86%, 87%, 88%, 89%, 90%, 91%, 92%, 93%, 94%, 95%, 96%, 97%, 98%, or 99% identity with SEQ ID NO: 68. In some specific embodiments, the nucleic acid comprising the kyn gene sequence comprises SEQ ID NO: 68. In other specific embodiments the nucleic acid comprising the kyn gene sequence consists of SEQ ID NO: 68. In some embodiments, the nucleic acid comprises a kyn gene sequence. In certain embodiments, the nucleic acid comprising the kyn gene sequence has at least about 80% identity with SEQ ID NO: 1283. In certain embodiments, the nucleic acid comprising the kyn gene sequence has at least about 90% identity with SEQ ID NO: 1283. In certain embodiments, the nucleic acid comprising the kyn gene sequence has at least about 95% identity with SEQ ID NO: 1283. In some embodiments, the nucleic acid comprising the kyn gene sequence has at least about 85%, 86%, 87%, 88%, 89%, 90%, 91%, 92%, 93%, 94%, 95%, 96%, 97%, 98%, or 99% identity with SEQ ID NO: 1283. In some specific embodiments, the nucleic acid comprising the kyn gene sequence comprises SEQ ID NO: 1283. In other specific embodiments the nucleic acid comprising the kyn gene sequence consists of SEQ ID NO: 1283.

[1082] In certain embodiments, the nucleic acid comprising the kyn gene sequence is operably linked to a constitutive promoter as described herein, e.g., PSYN23119. In certain embodiments, the nucleic acid comprising the kyn gene sequence is operably linked to a low oxygen inducible promoter and has at least about 80% identity with SEQ ID NO: 890. In certain embodiments, the nucleic acid comprising the kyn gene sequence operably linked to a low oxygen inducible promoter has at least about 90% identity with SEQ ID NO: 890. In certain embodiments, the nucleic acid comprising the kyn gene sequence operably linked to a low oxygen inducible promoter has at least about 95% identity with SEQ ID NO: 890. In some embodiments, the nucleic acid comprising the kyn gene sequence operably linked to a low oxygen inducible promoter has at least about 85%, 86%, 87%, 88%, 89%, 90%, 91%, 92%, 93%, 94%, 95%, 96%, 97%, 98%, or 99% identity with SEQ ID NO: 890. In some specific embodiments, the nucleic acid comprising the kyn gene sequence operably linked to a low oxygen inducible promoter comprises SEQ ID NO: 890. In other specific embodiments the nucleic acid comprising the kyn gene sequence operably linked to a low oxygen inducible promoter consists of SEQ ID NO: 890.

[1083] Additional suitable nucleic acid sequences are described in International Patent Application PCT/US2017/013072, filed Jan. 11, 2017, published as WO2017/123675, the contents of which is herein incorporated by reference in its entirety.

[1084] In any of the nucleic acid embodiments described above, the one or more nucleic acid sequence(s) for producing the effectors, e.g., immune modulators, e.g., immune initiators and or immune sustainers, are operably linked to one or more directly or indirectly inducible promoter(s). In some embodiments, the one or more nucleic acid sequence(s) are operably linked to a directly or indirectly inducible promoter that is induced under exogeneous environmental conditions, e.g., conditions found in the gut, the tumor microenvironment or other tissue specific conditions. In some embodiments, the one or more nucleic acid sequence(s) are operably linked to a directly or indirectly inducible promoter that is induced by metabolites found in the gut, the tumor microenvironment or other specific conditions. In some embodiments, the one or more nucleic acid sequence(s) are operably linked to a directly or indirectly inducible promoter that is induced under low-oxygen or anaerobic conditions. In some embodiments, the one or more nucleic acid sequence(s) are operably linked to a directly or indirectly inducible promoter that is induced under inflammatory conditions (e.g., RNS, ROS), as described herein. In some embodiments, the one or more nucleic acid sequence(s) are operably linked to a directly or indirectly inducible promoter that is induced under immunosuppressive conditions, e.g., as found in the tumor, as described herein. In some embodiments, the one or more gene sequence(s) are linked to a directly or indirectly inducible promoter that is induced by exposure a chemical or nutritional inducer, which may or may not be present under in vivo conditions and which may be present during in vitro conditions (such as strain culture, expansion, manufacture), such as tetracycline or arabinose, cumate, and salicylate, or others described herein. In some embodiments, the one or more payloads are linked to a constitutive promoter as described herein and in International Patent Application PCT/US2017/013072, filed Jan. 11, 2017, published as WO2017/123675, the contents of which is herein incorporated by reference in its entirety. In some embodiments, the one or more gene sequence are operably linked to the same promoter sequences. In some embodiments, the two or more gene sequence are operably linked to two or more different promoter sequences, which can either all be constitutive (same or different constitutive promoters), all inducible (by same or different inducers), or a mix of constitutive and inducible promoters.

[1085] In one embodiment, the one or more nucleic acid sequence(s) encoding one or more immune modulators is located on a plasmid in the bacterial cell. In another embodiment, the one or more nucleic acid sequence(s) encoding one or more immune modulators is located in the chromosome of the bacterial cell. In any of these nucleic acid embodiments, such the one or more nucleic acid sequence(s) encoding one or more immune modulators can be combined with any other nucleic acids encoding other immune modulators described herein.

[1086] In any of these embodiments, the nucleic acid sequence(s) encoding effector molecules, e.g., immune modulators, e.g., immune sustainers or immune modulators, described supra and elsewhere herein, may be combined with nucleic acid sequence(s) encoding one or more further effector molecule(s), i.e., therapeutic molecule(s) or a metabolic converter(s) (on the same or on a separate nucleic acid molecule). The nucleic acid sequences encoding the immune initiators or immune sustainers may be under the control of a constitutive or inducible promoter, e.g., low oxygen inducible promoter or any other constitutive or inducible promoter described herein.

[1087] In any of these embodiments, the nucleic acid sequence(s) encoding one or more of the effector molecules described supra may be combined with nucleic acid sequence(s) encoding one or more STING agonist producing enzymes, as described herein, (on the same or on a separate nucleic acid molecule). In some embodiments, the nucleic acid sequence(s) which are combined with the nucleic acid sequence(s) encoding the effector molecules encode DacA. DacA may be under the control of a constitutive or inducible promoter, e.g., low oxygen inducible promoter such as FNR or any other constitutive or inducible promoter described herein. In some embodiments, the nucleic acid sequence(s) which are combined with the gene sequence(s) encoding the effector molecules encode cGAS. cGAS may be under the control of a constitutive or inducible promoter, e.g., low oxygen inducible promoter such as FNR or any other constitutive or inducible promoter described herein.

[1088] In any of these combination embodiments, the nucleic acid sequence(s) comprise an nucleic acid sequence(s) with an auxotrophic modification, e.g., a mutation or deletion in DapA, ThyA, or both. In any of these embodiments, the nucleic acid sequence(s) comprise a nucleic acid sequence comprising a phage modification, e.g., a mutation or deletion, in an endogenous prophage as described herein.

### Secretion

[1089] In any of the embodiments described herein, in which the genetically engineered microorganism produces a protein, polypeptide, peptide, or other immune modulatory, DNA, RNA, small molecule or other molecule intended to be secreted from the microorganism, the engineered microorganism may comprise a secretion mechanism and corresponding gene sequence(s) encoding the secretion system.

[1090] In some embodiments, the genetically engineered bacteria further comprise a native secretion mechanism or non-native secretion mechanism that is capable of secreting the immune modulator from the bacterial cytoplasm in the extracellular environment. Many bacteria have evolved sophisticated secretion systems to transport substrates across the bacterial cell envelope. Substrates, such as small molecules, proteins, and DNA, may be released into the extracellular space or periplasm (such as the gut lumen or other space), injected into a target cell, or associated with the bacterial membrane.

[1091] In Gram-negative bacteria, secretion machineries may span one or both of the inner and outer membranes. In order to translocate a protein, e.g., therapeutic polypeptide, to the extracellular space, the polypeptide must first be translated intracellularly, mobilized across the inner membrane and finally mobilized across the outer membrane. Many effector proteins (e.g., therapeutic polypeptides)—particularly those of eukaryotic origin—contain disulphide bonds to stabilize the tertiary and quaternary structures. While these bonds are capable of correctly forming in the oxidizing periplasmic compartment with the help of periplasmic chaperones, in order to translocate the polypeptide across the outer membrane the disulphide bonds must be reduced and the protein unfolded again.

[1092] Suitable secretion systems for secretion of heterologous polypeptides, e.g., effector molecules, from gram negative and gram positive bacteria are described in International Patent Application PCT/US2017/013072, filed Jan. 11, 2017, published as WO2017/123675, the contents of which is herein incorporated by reference in its entirety. Such secretion systems include Double membrane-spanning secretion systems include, but are not limited to, the type I secretion system (T1SS), the type II secretion system (T2SS), the type III secretion system (T3SS), the type IV secretion system (T4SS), the type VI secretion system (T6SS), and the resistance-nodulation-division (RND) family of multi-drug efflux pumps, and type VII secretion system (T7SS). Alternatively, hemolysin-based secretion systems, Type V autotransporter secretion systems, traditional or modified type III or a type III-like secretion systems (T3SS), a flagellar type III secretion pathway may be used. In some embodiments, non-native single membrane-spanning secretion systems, e.g. Tat or Tat-like systems or Sec or Sec like systems may be used. Any of the secretion systems described herein and in PCT/US2017/013072 may according to the disclosure be employed to secrete the polypeptides of interest.

[1093] One way to secrete properly folded proteins in gram-negative bacteria—particularly those requiring disulphide bonds—is to target the reducing-environment periplasm in conjunction with a destabilizing outer membrane. In this manner the protein is mobilized into the oxidizing environment and allowed to fold properly. In contrast to orchestrated extracellular secretion systems, the protein is then able to escape the periplasmic space in a correctly folded form by membrane leakage. These “leaky” gram-negative mutants are therefore capable of secreting bioactive, properly disulphide-bonded polypeptides. In some embodiments, the genetically engineered bacteria have a “leaky” or de-stabilized outer membrane (DOM). Destabilizing the bacterial outer membrane to induce leakiness can be accomplished by deleting or mutagenizing genes responsible for tethering the outer membrane to the rigid peptidoglycan skeleton, including for example, 1pp, ompC, ompA, ompF, tolA, tolB, and pal. Lpp is the most abundant polypeptide in the bacterial cell existing at ˜500,000 copies per cell and functions as the primary ‘staple’ of the bacterial cell wall to the peptidoglycan. TolA-PAL and OmpA complexes function similarly to Lpp and are other deletion targets to generate a leaky phenotype. Additionally, leaky phenotypes have been observed when periplasmic proteases are inactivated. The periplasm is very densely packed with protein and therefore encode several periplasmic proteins to facilitate protein turnover. Removal of periplasmic proteases such as degS, degP or nlpl can induce leaky phenotypes by promoting an excessive build-up of periplasmic protein. Mutation of the proteases can also preserve the effector polypeptide by preventing targeted degradation by these proteases.

[1094] Moreover, a combination of these mutations may synergistically enhance the leaky phenotype of the cell without major sacrifices in cell viability. Thus, in some embodiments, the engineered bacteria have one or more deleted or mutated membrane genes. In some embodiments, the engineered bacteria have a deleted or mutated 1pp gene. In some embodiments, the engineered bacteria have one or more deleted or mutated gene(s), selected from ompA, ompA, and ompF genes. In some embodiments, the engineered bacteria have one or more deleted or mutated gene(s), selected from tolA, tolB, and pal genes. in some embodiments, the engineered bacteria have one or more deleted or mutated periplasmic protease genes. In some embodiments, the engineered bacteria have one or more deleted or mutated periplasmic protease genes selected from degS, degP, and nlpl. In some embodiments, the engineered bacteria have one or more deleted or mutated gene(s), selected from 1pp, ompA, ompF, tolA, tolB, pal, degS, degP, and nlpl genes.

[1095] To minimize disturbances to cell viability, the leaky phenotype can be made inducible by placing one or more membrane or periplasmic protease genes, e.g., selected from 1pp, ompA, ompF, tolA, tolB, pal, degS, degP, and nlpl, under the control of an inducible promoter. For example, expression of 1pp or other cell wall stability protein or periplasmic protease can be repressed in conditions where the therapeutic polypeptide needs to be delivered (secreted). For instance, under inducing conditions a transcriptional repressor protein or a designed antisense RNA can be expressed which reduces transcription or translation of a target membrane or periplasmic protease gene. Conversely, overexpression of certain peptides can result in a destabilized phenotype, e.g., overexpression of colicins or the third topological domain of TolA, wherein peptide overexpression can be induced in conditions in which the therapeutic polypeptide needs to be delivered (secreted). These sorts of strategies would decouple the fragile, leaky phenotypes from biomass production. Thus, in some embodiments, the engineered bacteria have one or more membrane and/or periplasmic protease genes under the control of an inducible promoter.

[1096] In some embodiments in which the one or more proteins of interest or therapeutic proteins are secreted or exported from the microorganism, the engineered microorganism comprises gene sequence(s) that includes a secretion tag. In some embodiments, the one or more proteins of interest or therapeutic proteins include a “secretion tag” of either RNA or peptide origin to direct the one or more proteins of interest or therapeutic proteins to specific secretion systems. The secretion tag can be from the sec or the that system.

[1097] In some embodiments, the genetically engineered bacterial comprise a native or non-native secretion system described herein for the secretion of an immune modulator, e.g., a cytokine, antibody (e.g., scFv), metabolic enzyme (e.g., kynureninase), and others described herein.

[1098] In some embodiments, the secretion tag is selected from PhoA, OmpF, cvaC, TorA, fdnG, dmsA, PelB, HlyA secretion signal, and HlyA secretion signal. In some embodiments, the secretion tag is the PhoA secretion signal. In some embodiments, the secretion tag comprises a sequence selected from SEQ ID NO: 745 or SEQ ID NO: 746. In some embodiments, the secretion tag is the OmpF secretion signal. In some embodiments, the secretion tag is the OmpF secretion signal. In some embodiments, the secretion tag comprises SEQ ID NO: 747. In some embodiments, the secretion tag is the cvaC secretion signal. In some embodiments, the secretion tag comprises SEQ ID NO: 748. In some embodiments, the secretion tag is the torA secretion signal. In some embodiments, the secretion tag comprises SEQ ID NO: 749. In some embodiments, the secretion tag is the fdnG secretion signal. In some embodiments, the secretion tag comprises SEQ ID NO: 750. In some embodiments, the secretion tag is the dmsA secretion signal. In some embodiments, the secretion tag comprises SEQ ID NO: 751. In some embodiments, the secretion tag is the PelB secretion signal. In some embodiments, the secretion tag comprises SEQ ID NO: 752. In some embodiments, the secretion tag is the HlyA secretion signal. In some embodiments, the secretion tag comprises a sequence selected from SEQ ID NO: 753 and SEQ ID NO: 754.

[1099] In some embodiments, the genetically engineered bacteria encode a polypeptide comprising a secretion tag selected from Adhesin (ECOLIN_19880), DsbA (ECOLIN_21525), GltI (ECOLIN_03430), GspD (ECOLIN_16495), HdeB (ECOLIN_19410), MalE (ECOLIN_22540), OppA (ECOLIN_07295), PelB, PhoA (ECOLIN_02255), PpiA (ECOLIN_18620), TolB, tort, OmpA, PelB, DsbA mglB, and lamB secretion tags. Exemplary sequences of secretion tags are shown in SEQ ID NO: 1222, SEQ ID NO: 1223, SEQ ID NO: 1224, SEQ ID NO: 1225, SEQ ID NO: 1226, SEQ ID NO: 1227, SEQ ID NO: 1228, SEQ ID NO: 1229, SEQ ID NO: 1230, SEQ ID NO: 1141, SEQ ID NO: 1142, SEQ ID NO: 1143, SEQ ID NO: 1144, SEQ ID NO: 1145, SEQ ID NO: 1253, SEQ ID NO: 1157, SEQ ID NO: 1158, SEQ ID NO: 1159, SEQ ID NO: 1160, SEQ ID NO: 1161, SEQ ID NO: 1162, SEQ ID NO: 1163, SEQ ID NO: 1164, SEQ ID NO: 1165, SEQ ID NO: 1166, and SEQ ID NO: 1167.

[1100] In some embodiments, a secretion tag polypeptide sequence may be selected from SEQ ID NO: 1218, SEQ ID NO: 1219, SEQ ID NO: 1181, SEQ ID NO: 1220, SEQ ID NO: 1221, SEQ ID NO: 1180, SEQ ID NO: 1184, SEQ ID NO: 1186, SEQ ID NO: 1190, SEQ ID NO: 1182, SEQ ID NO: 1135, SEQ ID NO: 1183, SEQ ID NO: 1188, SEQ ID NO: 1187, SEQ ID NO: 747, SEQ ID NO: 1185, and SEQ ID NO: 1189.

[1101] Any secretion tag or secretion system can be combined with any immune modulator described herein intended for secretion. In some embodiments, the secretion system is used in combination with one or more genomic mutations, which leads to the leaky or diffusible outer membrane phenotype (DOM), including but not limited to, 1pp, nlP, tolA, PAL. In some embodiments, the therapeutic proteins secreted by the genetically engineered bacteria are modified to increase resistance to proteases, e.g. intestinal proteases.

[1102] In some embodiments, the therapeutic polypeptides of interest, e.g., the immune modulators, e.g., immune initiators and/or immune sustainers described herein, are secreted via a diffusible outer membrane (DOM) system. In some embodiments, the therapeutic polypeptide of interest is fused to a N-terminal Sec-dependent secretion signal. Non-limiting examples of such N-terminal Sec-dependent secretion signals include PhoA, OmpF, OmpA, and cvaC. In alternate embodiments, the therapeutic polypeptide of interest is fused to a Tat-dependent secretion signal. Exemplary Tat-dependent tags include TorA, FdnG, and DmsA.

[1103] In certain embodiments, the genetically engineered bacteria comprise deletions or mutations in one or more of the outer membrane and/or periplasmic proteins. Non-limiting examples of such proteins, one or more of which may be deleted or mutated, include 1pp, pal, tolA, and/or nlpI. In some embodiments, 1pp is deleted or mutated. In some embodiments, pal is deleted or mutated. In some embodiments, tolA is deleted or mutated. In other embodiments, nlpI is deleted or mutated. In yet other embodiments, certain periplasmic proteases are deleted or mutated, e.g., to increase stability of the polypeptide in the periplasm. Non-limiting examples of such proteases include degP and ompT. In some embodiments, degP is deleted or mutated. In some embodiments, ompT is deleted or mutated. In some embodiments, degP and ompT are deleted or mutated.

### Surface Display

[1104] In some embodiments, the genetically engineered bacteria and/or microorganisms encode one or more gene(s) and/or gene cassette(s) encoding an immune modulator which is anchored or displayed on the surface of the bacteria and/or microorganisms. Examples of the immune modulators which are displayed or anchored to the bacteria and/or microorganism, are any of the immune modulators described herein, and include but are not limited to antibodies, e.g., scFv fragments, and tumor-specific antigens or neoantigens. In a non-limiting example, the antibodies or scFv fragments which are anchored or displayed on the bacterial cell surface are directed against checkpoint inhibitors described herein, including, but not limited to, CLTLA4, PD-1, PD-L1.

[1105] Suitable systems for surface display of heterologous polypeptides, e.g., effector molecules, on the surface of gram negative and gram positive bacteria are described in International Patent Application PCT/US2017/013072, filed Jan. 11, 2017, published as WO2017/123675, the contents of which is herein incorporated by reference in its entirety

[1106] In some embodiments, the genetically engineered bacteria comprise a gene sequence encoding a therapeutic polypeptide comprising an invasion display tag. In one embodiment, the genetically engineered bacteria comprise a gene sequence encoding a polypeptide comprising SEQ ID NO: 990.

[1107] In some embodiments, the genetically engineered bacteria comprise a gene sequence encoding a therapeutic polypeptide comprising an LppOmpA display tag. In one embodiment, the genetically engineered bacteria comprise a gene sequence encoding a polypeptide comprising SEQ ID NO: 991.

[1108] In some embodiments, the genetically engineered bacteria comprise a gene sequence encoding a therapeutic polypeptide comprising an intimin N display tag. In one embodiment, the genetically engineered bacteria comprise a gene sequence encoding a polypeptide comprising SEQ ID NO: 992. In some embodiments, the genetically engineered bacteria comprise a display anchor which is at least about 80%, at least about 85%, at least about 90%, at least about 95%, or at least about 99% homologous to a sequence selected from SEQ ID NO: 990, SEQ ID NO: 991, and SEQ ID NO: 992. In another embodiment, the genetically engineered bacteria comprise a gene sequence encoding display anchor comprising a sequence selected from SEQ ID NO: 990, SEQ ID NO: 991, and SEQ ID NO: 992. In yet another embodiment, the display anchor expressed by the genetically engineered bacteria consists of a sequence selected from SEQ ID NO: 990, SEQ ID NO: 991, and SEQ ID NO: 992.

[1109] In some embodiments, one or more ScFvs are displayed on the bacterial cell surface, alone or in combination with other therapeutic polypeptides of interest.

[1110] In some embodiments, a cell surface display strategy or circuit is combined with a secretion strategy or circuit in one bacterium. In some embodiments, the same polypeptide is both displayed and secreted. In some embodiments, a first polypeptide is displayed and a second is secreted. In some embodiments, a display strategy or circuit strategy is combined with a circuit for the intracellular production of an enzyme and consequentially intracellular catabolism of its substrate. In some embodiments, a display strategy or display circuit is combined with a circuit for the intracellular production of a gut barrier enhancer molecule and/or an anti-inflammatory effector molecule.

[1111] In some embodiments, the expression of the surface displayed polypeptide or fusion protein is driven by an inducible promoter. In some embodiments, the inducible promoter is an oxygen level-dependent promoter (e.g., FNR-inducible promoter). In some embodiments, the inducible promoter is induced by gut-specific and/or tumor-specific or promoters induced by inflammation or an inflammatory response (RNS, ROS promoters), or promoters induced by a metabolite that may or may not be naturally present (e.g., can be exogenously added) in the gut, e.g., arabinose, cumate, and salicylate. In alternate embodiments, expression of the surface displayed polypeptides or polypeptide fusion proteins is driven by a constitutive promoter.

[1112] In some embodiments, the expression of the surface displayed polypeptide or fusion protein is plasmid based. In some embodiments, the gene sequence(s) encoding the antibodies or scFv fragments for surface display is chromosomally inserted.

### Essential Genes, Auxotrophs, Kill Switches, and Host-Plasmid Dependency

[1113] As used herein, the term “essential gene” refers to a gene that is necessary to for cell growth and/or survival. Bacterial essential genes are well known to one of ordinary skill in the art, and can be identified by directed deletion of genes and/or random mutagenesis and screening (see, for example, Zhang and Lin, 2009, DEG 5.0, a database of essential genes in both prokaryotes and eukaryotes, Nucl. Acids Res., 37:D455-D458 and Gerdes et al., Essential genes on metabolic maps, Curr. Opin. Biotechnol., 17(5):448-456, the entire contents of each of which are expressly incorporated herein by reference).

[1114] An “essential gene” may be dependent on the circumstances and environment in which an organism lives. For example, a mutation of, modification of, or excision of an essential gene may result in the recombinant bacteria of the disclosure becoming an auxotroph. An auxotrophic modification is intended to cause bacteria to die in the absence of an exogenously added nutrient essential for survival or growth because they lack the gene(s) necessary to produce that essential nutrient.

[1115] An auxotrophic modification is intended to cause bacteria to die in the absence of an exogenously added nutrient essential for survival or growth because they lack the gene(s) necessary to produce that essential nutrient. In some embodiments, any of the genetically engineered bacteria described herein also comprise a deletion or mutation in a gene required for cell survival and/or growth. In one embodiment, the essential gene is a DNA synthesis gene, for example, thyA. In another embodiment, the essential gene is a bacterial cell wall synthesis gene, for example, dapA. In yet another embodiment, the essential gene is an amino acid gene, for example, serA or metA. Any gene required for cell survival and/or growth may be targeted, including but not limited to, cysE, ginA, ilvD, leuB, lysA, serA, metA, glyA, hisB, ilvA, pheA, proA, thrC, trpC, tyrA, thyA, uraA, dapA, dapB, dapD, dapE, dapF, flhD, metB, metC, proAB, and thi1, as long as the corresponding wild-type gene product is not produced in the bacteria. Exemplary bacterial genes which may be disrupted or deleted to produce an auxotrophic strain as described in International Patent Application PCT/US2017/013072, filed Jan. 11, 2017, published as WO2017/123675, the contents of which is herein incorporated by reference in its entirety. These include, but are not limited to, genes required for oligonucleotide synthesis, amino acid synthesis, and cell wall synthesis. Table 12 lists exemplary bacterial genes which may be disrupted or deleted to produce an auxotrophic strain. These include, but are not limited to, genes required for oligonucleotide synthesis, amino acid synthesis, and cell wall synthesis.

TABLE 12
Non-limiting Examples of Bacterial Genes
Useful for Generation of an Auxotroph

| Amino Acid | Oligonucleotide | Cell Wall |
|---|---|---|
| cysE | thyA | dapA |
| glnA | uraA | dapB |
| ilvD | | dapD |
| leuB | | dapE |
| lysA | | dapF |
| serA | | |
| metA | | |
| glyA | | |
| hisB | | |
| ilvA | | |
| pheA | | |
| proA | | |
| thrC | | |
| trpC | | |
| tyrA | | |

[1116] Auxotrophic mutations are useful in some instances in which biocontainment strategies may be required to prevent unintended proliferation of the genetically engineered bacterium in a natural ecosystem. Any auxotrophic mutation in an essential gene described above or known in the art can be useful for this purpose, e.g. DNA synthesis genes, amino acid synthesis genes, or genes for the synthesis of cell wall. Accordingly, in some embodiments, the genetically engineered bacteria comprise modifications, e.g., mutation(s) or deletion(s) in one or more auxotrophic genes, e.g., to prevent growth and proliferation of the bacterium in the natural environment. In some embodiments, the modification may be located in a non-coding region. In some embodiments, the modifications result in attenuation of transcription or translation. In some embodiments, the modifications, e.g., mutations or deletions, result in reduced or no transcription or reduced or no translation of the essential gene. In some embodiments, the modifications, e.g., mutations or deletions, result in transcription and/or translation of a non-functional version of the essential gene. In some embodiments, the modifications, e.g., mutations or deletions result in truncated transcription or translation of the essential gene, resulting in a truncated polypeptide. In some embodiments, the modification, e.g., mutation is located within the coding region of the gene.

[1117] While unable to grow in the natural ecosystem, certain auxotrophic mutations may allow growth and proliferation in the mammalian host administered the bacteria, e.g., in the tumor environment. For example, an essential pathway that is rendered non-functional by the auxotrophic mutation may be complemented by production of the metabolite by the host within the tumor microenvironment. As a result, the bacterium administered to the host can take up the metabolite from the environment and can proliferate and colonize the tumor. Thus, in some embodiments, the auxotrophic gene is an essential gene for the production of a metabolite, which is also produced by the mammalian host in vivo, e.g., in a tumor setting. In some embodiments, metabolite production by the host tumor may allow uptake of the metabolite by the bacterium and permit survival and/or proliferation of the bacterium within the tumor. In some embodiments, bacteria comprising such auxotrophic mutations are capable of proliferating and colonizing the tumor to the same extent as a bacterium of the same subtype which does not carry the auxotrophic mutation.

[1118] In some embodiments, the bacteria are capable of colonizing and proliferating in the tumor microenvironment. In some embodiments, the tumor colonizing bacteria comprise one or more auxotrophic mutations. In some embodiments, the tumor colonizing bacteria do not comprise one or more auxotrophic modifications or mutations. In a non-limiting example, greater numbers of bacteria are detected after 24 hours and 72 hours than were originally injected into the subject. In some embodiments,

[1119] CFUs detected 24 hours post injection are at least about 1 to 2 logs greater than administered. In some embodiments, CFUs detected 24 hours post injection are at least about 2 to 3 logs greater than administered. In some embodiments, CFUs detected 24 hours post injection are at least about 3 to 4 logs greater than administered. In some embodiments, CFUs detected 24 hours post injection are at least about 4 to 5 logs greater than administered. In some embodiments, CFUs detected 24 hours post injection are at least about 5 to 6 logs greater than administered. In some embodiments, CFUs detected 72 hours post injection are at least about 1 to 2 logs greater than administered. In some embodiments, CFUs detected 72 hours post injection are at least about 2 to 3 logs greater than administered. In some embodiments, CFUs detected 72 hours post injection are at least about 3 to 4 logs greater than administered. In some embodiments, CFUs detected 72 hours post injection are at least about 4 to 5 logs greater than administered. In some embodiments, CFUs detected 72 hours post injection are at least about 5 to 6 logs greater than administered. In some embodiments, CFUs can be measured at later time points, such as after at least one week, after at least 2 or more weeks, after at least one month, after at least two or more months post injection.

[1120] Non-limiting examples of such auxotrophic genes, which allow proliferation and colonization of the tumor, are thyA and uraA, as shown herein. Accordingly, in some embodiments, the genetically engineered bacteria of the disclosure may comprise an auxotrophic modification, e.g., mutation or deletion, in the thyA gene. In some embodiments, the genetically engineered bacteria of the disclosure may comprise an auxotrophic modification, e.g., mutation or deletion, in the uraA gene. In some embodiments, the genetically engineered bacteria of the disclosure may comprise auxotrophic modification, e.g., mutation or deletion, in the thyA gene and the uraA gene.

[1121] Alternatively, the auxotrophic gene is an essential gene for the production of a metabolite which cannot be produced by the host within the tumor, i.e, the auxotrophic mutation is not complemented by production of the metabolite by the host within the tumor microenvironment. As a result, the this mutation may affect the ability of the bacteria to grow and colonize the tumor and bacterial counts decrease over time. This type of auxotrophic mutation can be useful for the modulation of in vivo activity of the immune modulator or duration of activity of the immune modulator, e.g., within a tumor. An example of this method of fine-tuning levels and timing of immune modulator release is described herein using a auxotrophic modification, e.g, mutation, in dapA. Diaminopimelic acid (Dap) is a characteristic component of certain bacterial cell walls, e.g., of gram negative bacteria. Without diaminopimelic acid, bacteria are unable to form proteoglycan, and as such are unable to grow. DapA is not produced by mammalian cells, and therefore no alternate source of DapA is provided in the tumor. As such, a dapA auxotrophy may present a particularly useful strategy to modulate and fine tune timing and extent of bacterial presence in the tumor and/or levels and timing of immune modulator expression and production. Accordingly, in some embodiments, the genetically engineered bacteria of the disclosure comprise an mutation in an essential gene for the production of a metabolite which cannot be produced by the host within the tumor. In some embodiments, the auxotrophic mutation is in a gene which is essential for the production and maintenance of the bacterial cell wall known in the art or described herein, or a mutation in a gene that is essential to another structure that is unique to bacteria and not present in mammalian cells. In some embodiments, bacteria comprising such auxotrophic mutations are capable of proliferating and colonizing the tumor to a substantially lesser extent than a bacterium of the same subtype which does not carry the auxotrophic mutation. Control of bacterial growth (and by extent effector levels) may be further combined with other regulatory strategies, including but not limited to, metabolite or chemically inducible promoters described herein.

[1122] In a non-limiting example, lower numbers of bacteria are detected after 24 hours and 72 hours than were originally injected into the subject. In some embodiments, CFUs detected 24 hours post injection are at least about 1 to 2 logs lower than administered. In some embodiments, CFUs detected 24 hours post injection are at least about 2 to 3 logs lower than administered. In some embodiments, CFUs detected 24 hours post injection are at least about 3 to 4 logs lower than administered. In some embodiments, CFUs detected 24 hours post injection are at least about 4 to 5 logs lower than administered. In some embodiments, CFUs detected 24 hours post injection are at least about 5 to 6 logs lower than administered. In some embodiments, CFUs detected 72 hours post injection are at least about 1 to 2 logs lower than administered. In some embodiments, CFUs detected 72 hours post injection are at least about 2 to 3 logs lower than administered. In some embodiments, CFUs detected 72 hours post injection are at least about 3 to 4 logs lower than administered. In some embodiments, CFUs detected 72 hours post injection are at least about 4 to 5 logs lower than administered. In some embodiments, CFUs detected 72 hours post injection are at least about 5 to 6 logs lower than administered. In some embodiments, CFUs can be measured at later time points, such as after at least one week, after at least 2 or more weeks, after at least one month, after at least two or more months post injection.

[1123] In some embodiments, the genetically engineered bacteria of the disclosure comprise a auxotrophic modification, e.g., mutation, in dapA. A non-limiting example described herein is a genetically engineered bacterium comprising gene sequences encoding dacA for c-di-AMP production. Production of the STING agonist can be temporally regulated or restricted through the introduction of a dapA auxotrophy. In some embodiments, the dapA auxotrophy provides a means for tunable STING agonist production.

[1124] Auxotrophic modifications may also be used to screen for mutant bacteria that produce the effector molecule for various applications. In one example, the auxotrophy is useful to monitor purity or “sterility” of batches in small and large scale production of a bacterial strain. In this case, the auxotrophy presents a means to distinguish the engineered bacterium from a potential contaminant. In a non-limiting example, during the manufacturing process of the live biotherapeutic (i.e., large scale), an auxotrophy can be a useful tool to demonstrate purity or “sterility” of the drug substance. This method to determine purity of the culture is particularly useful in the absence of an antibiotic resistance gene, which is often used for this purpose in experimental strains, but which may be removed during the development of the live therapeutic drug product.

[1125] trpE is another auxotrophic mutation described herein. Bacteria carrying this mutation cannot produce tryptophan. Genetically engineered bacteria described herein with a trpE mutation further comprise kynureninase. Kynureninase allows the bacterium to convert kynurenine into the tryptophan precursor anthranilate and therefore the bacterium can grow in the absence of tryptophan if kynurenine is present.

[1126] In some embodiments, the genetically engineered bacteria comprise auxotrophic mutation(s) in one essential gene. In some embodiments, the genetically engineered bacteria comprise auxotrophic mutation(s) in two essential genes (double auxotrophy). In some embodiments, the genetically engineered bacteria comprise auxotrophic mutation(s) in three or more essential gene(s).

[1127] In some embodiments, the genetically engineered bacteria comprise auxotrophic mutation(s) in dapA and thyA. In some embodiments, the genetically engineered bacteria comprise auxotrophic mutation(s) in dapA and uraA. In some embodiments, the genetically engineered bacteria comprise auxotrophic mutation(s) in thyA and uraA. In some embodiments, the genetically engineered bacteria comprise auxotrophic mutation(s) in dapA, thyA and uraA.

[1128] In some embodiments, the genetically engineered bacteria comprise auxotrophic mutation(s) in trpE. In some embodiments, the genetically engineered bacteria comprise auxotrophic mutation(s) in trpE and thyA. In some embodiments, the genetically engineered bacteria comprise auxotrophic mutation(s) in trpE and dapA. In some embodiments, the genetically engineered bacteria comprise auxotrophic mutation(s) in trpE and uraA. In some embodiments, the genetically engineered bacteria comprise auxotrophic mutation(s) in trpE, dapA and thyA. In some embodiments, the genetically engineered bacteria comprise auxotrophic mutation(s) in trpE, dapA and uraA. In some embodiments, the genetically engineered bacteria comprise auxotrophic mutation(s) in trpE, thyA and uraA. In some embodiments, the genetically engineered bacteria comprise auxotrophic mutation(s) in trpE, dapA, thyA and uraA.

[1129] In another non-limiting example, a conditional auxotroph can be generated. The chromosomal copy of dapA or thyA is knocked out. Another copy of thyA or dapA is introduced, e.g., under control of a low oxygen promoter. Under anaerobic conditions, dapA or thyA—as the case may be-are expressed, and the strain can grow in the absence of dap or thymidine. Under aerobic conditions, dapA or thyA expression is shut off, and the strain cannot grow in the absence of dap or thymidine. Such a strategy can also be employed to allow survival of bacteria under anaerobic conditions, e.g., the gut or conditions of the tumor microenvironment, but prevent survival under aerobic conditions.

[1130] In some embodiments, the genetically engineered bacterium of the present disclosure is a synthetic ligand-dependent essential gene (SLiDE) bacterial cell. SLiDE bacterial cells are synthetic auxotrophs with a mutation in one or more essential genes that only grow in the presence of a particular ligand (see Lopez and Anderson “Synthetic Auxotrophs with Ligand-Dependent Essential Genes for a BL21 (DE3 Biosafety Strain, “ACS Synthetic Biology (2015) DOI: 10.1021/acssynbio.5b00085, the entire contents of which are expressly incorporated herein by reference). SLiDE bacterial cells are described in International Patent Application PCT/US2017/013072, filed Jan. 11, 2017, published as WO2017/123675, the contents of which is herein incorporated by reference in its entirety.

[1131] In some embodiments, the genetically engineered bacteria of the invention also comprise a kill switch. Suitable kill switches are described in International Patent Application PCT/US2016/39427, filed Jun. 24, 2016, published as WO2016/210373, the contents of which are herein incorporated by reference in their entirety. The kill switch is intended to actively kill engineered microbes in response to external stimuli. As opposed to an auxotrophic mutation where bacteria die because they lack an essential nutrient for survival, the kill switch is triggered by a particular factor in the environment that induces the production of toxic molecules within the microbe that cause cell death.

[1132] In some embodiments, the genetically engineered bacteria of the invention also comprise a plasmid that has been modified to create a host-plasmid mutual dependency. In certain embodiments, the mutually dependent host-plasmid platform is as described in Wright et al., 2015. These and other systems and platforms are described in International Patent Application PCT/US2017/013072, filed Jan. 11, 2017, published as WO2017/123675, the contents of which is herein incorporated by reference in its entirety.

### Genetic Regulatory Circuits

[1133] In some embodiments, the genetically engineered bacteria comprise multi-layered genetic regulatory circuits for expressing the constructs described herein. Suitable multi-layered genetic regulatory circuits are described in International Patent Application PCT/US2016/39434, filed on Jun. 24, 2016, published as WO2016/210378, the contents of which is herein incorporated by reference in its entirety. The genetic regulatory circuits are useful to screen for mutant bacteria that produce an immune modulator or rescue an auxotroph. In certain embodiments, the invention provides methods for selecting genetically engineered bacteria that produce one or more genes of interest.

### Pharmaceutical Compositions and Formulations

[1134] Pharmaceutical compositions comprising the genetically engineered microorganisms of the invention may be used to treat, manage, ameliorate, and/or prevent cancer. Pharmaceutical compositions of the invention comprising one or more genetically engineered bacteria, alone or in combination with prophylactic agents, therapeutic agents, and/or pharmaceutically acceptable carriers are provided.

[1135] In certain embodiments, the pharmaceutical composition comprises one species, strain, or subtype of bacteria that are engineered to comprise the genetic modifications described herein, e.g., one or more genes encoding one or more effectors, e.g., immune modulators. In alternate embodiments, the pharmaceutical composition comprises two or more species, strains, and/or subtypes of bacteria that are each engineered to comprise the genetic modifications described herein, e.g., one or more genes encoding one or more effectors, e.g., immune modulators.

[1136] In some embodiments, the genetically engineered bacteria are administered systemically or intratumorally as spores. As a non-limiting example, the genetically engineered bacteria are Clostridial strains, and administration results in a selective colonization of hypoxic/necrotic areas within the tumor. In some embodiments, the spores germinate exclusively in the hypoxic/necrotic regions present in solid tumors and nowhere else in the body.

[1137] The pharmaceutical compositions of the invention may be formulated in a conventional manner using one or more physiologically acceptable carriers comprising excipients and auxiliaries, which facilitate processing of the active ingredients into compositions for pharmaceutical use. Methods of formulating pharmaceutical compositions are known in the art (see, e.g., “Remington's Pharmaceutical Sciences,” Mack Publishing Co., Easton, Pa.). In some embodiments, the pharmaceutical compositions are subjected to tableting, lyophilizing, direct compression, conventional mixing, dissolving, granulating, levigating, emulsifying, encapsulating, entrapping, or spray drying to form tablets, granulates, nanoparticles, nanocapsules, microcapsules, microtablets, pellets, or powders, which may be enterically coated or uncoated. Appropriate formulation depends on the route of administration.

[1138] The genetically engineered microorganisms may be formulated into pharmaceutical compositions in any suitable dosage form (e.g., liquids, capsules, sachet, hard capsules, soft capsules, tablets, enteric coated tablets, suspension powders, granules, or matrix sustained release formations for oral administration) and for any suitable type of administration (e.g., oral, topical, injectable, intravenous, sub-cutaneous, intratumoral, peritumor, immediate-release, pulsatile-release, delayed-release, or sustained release). Suitable dosage amounts for the genetically engineered bacteria may range from about 10⁴ to 10¹² bacteria. The composition may be administered once or more daily, weekly, or monthly. The composition may be administered before, during, or following a meal. In one embodiment, the pharmaceutical composition is administered before the subject eats a meal. In one embodiment, the pharmaceutical composition is administered currently with a meal. In on embodiment, the pharmaceutical composition is administered after the subject eats a meal.

[1139] The genetically engineered bacteria may be formulated into pharmaceutical compositions comprising one or more pharmaceutically acceptable carriers, thickeners, diluents, buffers, buffering agents, surface active agents, neutral or cationic lipids, lipid complexes, liposomes, penetration enhancers, carrier compounds, and other pharmaceutically acceptable carriers or agents. For example, the pharmaceutical composition may include, but is not limited to, the addition of calcium bicarbonate, sodium bicarbonate, calcium phosphate, various sugars and types of starch, cellulose derivatives, gelatin, vegetable oils, polyethylene glycols, and surfactants, including, for example, polysorbate 20. In some embodiments, the genetically engineered bacteria of the invention may be formulated in a solution of sodium bicarbonate, e.g., 1 molar solution of sodium bicarbonate (to buffer an acidic cellular environment, such as the stomach, for example). The genetically engineered bacteria may be administered and formulated as neutral or salt forms. Pharmaceutically acceptable salts include those formed with anions such as those derived from hydrochloric, phosphoric, acetic, oxalic, tartaric acids, etc., and those formed with cations such as those derived from sodium, potassium, ammonium, calcium, ferric hydroxides, isopropylamine, triethylamine, 2-ethylamino ethanol, histidine, procaine, etc.

[1140] The genetically engineered microorganisms may be administered intravenously, e.g., by infusion or injection. Alternatively, the genetically engineered microorganisms may be administered intratumorally and/or peritumorally. In other embodiments, the genetically engineered microorganisms may be administered intra-arterially, intramuscularly, or intraperitoneally. In some embodiments, the genetically engineered bacteria colonize about 20%, 30%, 40%, 50%, 60%, 70%, 80%, 90% or more of the tumor. In some embodiments, the genetically engineered bacteria are co-administered with a PEGylated form of rHuPH20 (PEGPH20) or other agent in order to destroy the tumor septae in order to enhance penetration of the tumor capsule, collagen, and/or stroma. In some embodiments, the genetically engineered bacteria are capable of producing an immune modulator as well as one or more enzymes that degrade fibrous tissue.

[1141] The genetically engineered microorganisms of the disclosure may be administered via intratumoral injection, resulting in bacteria or virus that is directly deposited within the target tumor. Intratumoral injection of the engineered bacteria or virus may elicit a potent localized inflammatory response as well as an adaptive immune response against tumor cells. Bacteria or virus are suspended in solution before being withdrawn into a 1-ml syringe. In some embodiments, the tumor is injected with an 18-gauge multipronged needle (Quadra-Fuse, Rex Medical). The injection site is aseptically prepared. If available, ultrasound or CT may be used to identify a necrotic region of the tumor for injection. If a necrotic region is not identified, the injection can be directed to the center of the tumor. The needle is inserted once into a predefined region, and dispensed with even pressure. The injection needle is removed slowly, and the injection site is sterilized.

[1142] Direct intratumoral injection of the genetically engineered bacteria or virus of the invention into solid tumors may be advantageous as compared to intravenous administration. Using an intravenous injection method, only a small proportion of the bacteria may reach the target tumor. For example, following E. coli Nissle injection into the tail vein of 4T1 tumor-bearing mice, most bacteria (>99%) are quickly cleared from the animals and only a small percentage of the administered bacteria colonize the tumor (Stritzker et al., 2007). In particular, in large animals and human patients, which have relatively large blood volumes and relatively small tumors compared to mice, intratumoral injection may be especially beneficial. Injection directly into the tumor allows the delivery of a higher concentration of therapeutic agent and avoids the toxicity, which can result from systemic administration. In addition, intratumoral injection of bacteria induces robust and localized immune responses within the tumor.

[1143] Depending on the location, tumor type, and tumor size, different administration techniques may be used, including but not limited to, cutaneous, subcutaneous, and percutaneous injection, therapeutic endoscopic ultrasonography, or endobronchial intratumor delivery. Prior to the intratumor administration procedures, sedation in combination with a local anesthetic and standard cardiac, pressure, and oxygen monitoring, or full anesthesia of the patient is performed.

[1144] For some tumors, percutaneous injection can be employed, which is the least invasive administration method. Ultrasound, computed tomography (CT) or fluoroscopy can be used as guidance to introduce and position the needle. Percutaneous intratumoral injection is for example described for hepatocellular carcinoma in Lencioni et al., 2010. Intratumoral injection of cutaneous, subcutaneous, and nodal tumors is for example described in WO/2014/036412 (Amgen) for late stage melanoma.

[1145] Single insertion points or multiple insertion points can be used in percutaneous injection protocols. Using a single insertion point, the solution may be injected percutaneously along multiple tracks, as far as the radial reach of the needle allows. In other embodiments, multiple injection points may be used if the tumor is larger than the radial reach of the needle. The needle can be pulled back without exiting, and redirected as often as necessary until the full dose is injected and dispersed. To maintain sterility, a separate needle is used for each injection. Needle size and length varies depending on the tumor type and size.

[1146] In some embodiments, the tumor is injected percutaneously with an 18-gauge multipronged needle (Quadra-Fuse, Rex Medical). The device consists of an 18 gauge puncture needle 20 cm in length. The needle has three retractable prongs, each with four terminal side holes and a connector with extension tubing clamp. The prongs are deployed from the lateral wall of the needle. The needle can be introduced percutaneously into the center of the tumor and can be positioned at the deepest margin of the tumor. The prongs are deployed to the margins of the tumor. The prongs are deployed at maximum length and then are retracted at defined intervals. Optionally, one or more rotation-injection-rotation maneuvers can be performed, in which the prongs are retracted, the needle is rotated by a 60 degrees, which is followed by repeat deployment of the prongs and additional injection.

[1147] Therapeutic endoscopic ultrasonography (EUS) is employed to overcome the anatomical constraints inherent in gaining access to certain other tumors (Shirley et al., 2013). EUS-guided fine needle injection (EUS-FNI) has been successfully used for antitumor therapies for the treatment of head and neck, esophageal, pancreatic, hepatic, and adrenal masses (Verna et al, 2008). EUS-FNI has been extensively used for pancreatic cancer injections. Fine-needle injection requires the use of the curvilinear echoendoscope. The esophagus is carefully intubated and the echoendoscope is passed into the stomach and duodenum where the pancreatic examination occurs, and the target tumor is identified. The largest plane is measured to estimate the tumor volume and to calculate the injection volume. The appropriate volume is drawn into a syringe. A primed 22-gauge fine needle aspiration (FNA) needle is passed into the working channel of the echoendoscope. Under ultrasound guidance, the needle is passed into the tumor. Depending on the size of the tumor, administration can be performed by dividing the tumor into sections and then injecting the corresponding fractions of the volume into each section. Use of an installed endoscopic ultrasound processor with Doppler technology assures there are no arterial or venous structures that may interfere with the needle passage into the tumor (Shirley et al., 2013). In some embodiments, ‘multiple injectable needle’ (MIN) for EUS-FNI can be used to improvement the injection distribution to the tumor in comparison with straight-type needles (Ohara et al., 2013).

[1148] Intratumoral administration for lung cancer, such as non-small cell lung cancer, can be achieved through endobronchial intratumor delivery methods, as described in Celikoglu et al., 2008. Bronchoscopy (trans-nasal or oral) is conducted to visualize the lesion to be treated. The tumor volume can be estimated visually from visible length-width height measurements over the bronchial surface. The needle device is then introduced through the working channel of the bronchoscope. The needle catheter, which consists of a metallic needle attached to a plastic catheter, is placed within a sheath to prevent damage by the needle to the working channel during advancement. The needle size and length varies and is determined according to tumor type and size of the tumor. Needles made from plastic are less rigid than metal needles and are ideal, since they can be passed around sharper bends in the working channel. The needle is inserted into the lesion and the genetically engineered bacteria of the invention are in injected. Needles are inserted repeatedly at several insertion points until the tumor mass is completely perfused. After each injection, the needle is withdrawn entirely from the tumor and is then embedded at another location. At the end of the bronchoscopic injection session, removal of any necrotic debris caused by the treatment may be removed using mechanical dissection, or other ablation techniques accompanied by irrigation and aspiration.

[1149] In some embodiments, the genetically engineered bacteria or virus capable of delivering an immune modulator to a target tumor are administrated directly into the tumor using methods, including but not limited to, percutaneous injection, EUS-FNI, or endobronchial intratumor delivery methods. In some cases, other techniques, such as laparoscopic or open surgical techniques are used to access the target tumor, however, these techniques are much more invasive and bring with them much greater morbidity and longer hospital stays.

[1150] In some embodiments, bacteria, e.g., E. coli Nissle, or spores, e.g., Clostridium novyi NT, are dissolved in sterile phosphate buffered saline (PBS) for systemic or intratumor injection.

[1151] The dose to be injected is derived from the type and size of the tumor. The dose of a drug or the genetically engineered bacteria or virus of the invention is typically lower, e.g., orders of magnitude lower, than a dose for systemic intravenous administration.

[1152] The volume injected into each lesion is based on the size of the tumor. To obtain the tumor volume, a measurement of the largest plane can be conducted. The estimated tumor volume can then inform the determination of the injection volume as a percentage of the total volume. For example, an injection volume of approximately 20-40% of the total tumor volume can be used.

[1153] For example, as is for example described in WO/2014/036412, for tumors larger than 5 cm in their largest dimension, up to 4 ml can be injected. For tumors between 2.5 and 5 cm in their largest dimension, up to 2 ml can be injected. For tumors between 2.5 and 5 cm in their largest dimension, up to 2 ml can be injected. For tumors between 1.5 and 2.5 cm in their largest dimension, up to 1 ml can be injected. For tumors between 0.5 and 1.5 cm in their largest dimension, up to 0.5 ml can be injected. For tumors equal or small than 0.5 in their largest dimension, up to 0.1 ml can be injected. Alternatively, ultrasound scan can be used to determine the injection volume that can be taken up by the tumor without leakage into surrounding tissue.

[1154] In some embodiments, the treatment regimen will include one or more intratumoral administrations. In some embodiments, a treatment regimen will include an initial dose, which followed by at least one subsequent dose. One or more doses can be administered sequentially in two or more cycles.

[1155] For example, a first dose may be administered at day 1, and a second dose may be administered after 1, 2, 3, 4, 5, 6, days or 1, 2, 3, or 4 weeks or after a longer interval. Additional doses may be administered after 1, 2, 3, 4, 5, 6, days or after 1, 2, 3, or 4 weeks or longer intervals. In some embodiments, the first and subsequent administrations have the same dosage. In other embodiments, different doses are administered. In some embodiments, more than one dose is administered per day, for example, two, three or more doses can be administered per day.

[1156] The routes of administration and dosages described are intended only as a guide. The optimum route of administration and dosage can be readily determined by a skilled practitioner. The dosage may be determined according to various parameters, especially according to the location of the tumor, the size of the tumor, the age, weight and condition of the patient to be treated and the route and method of administration.

[1157] In one embodiment, Clostridium spores are delivered systemically. In another embodiment, Clostridium spores are delivered via intratumor injection. In one embodiment, E. coli Nissle are delivered via intratumor injection. In other embodiments, E. coli Nissle, which is known to hone to tumors, is administered via intravenous injection or orally, as described in a mouse model in for example in Danino et al. 2015, or Stritzker et al., 2007, the contents of which is herein incorporated by reference in its entirety. E. coli Nissle mutations to reduce toxicity include but are not limited to msbB mutants resulting in non-myristoylated LPS and reduced endotoxin activity, as described in Stritzker et al., 2010 (Stritzker et al, Bioengineered Bugs 1:2, 139-145; Myristylation negative msbB-mutants of probiotic E. coli Nissle 1917 retain tumor specific colonization properties but show less side effects in immunocompetent mice.

[1158] For intravenous injection a preferred dose of bacteria is the dose in which the greatest number of bacteria is found in the tumor and the lowest amount found in other tissues. In mice, Stritzker et al (International Journal of Medical Microbiology 297 (2007) 151-162; Tumor specific colonization, tissue distribution, and gene induction by Escherichia coli Nissle 1917 in live mice) found that the lowest number of bacteria needed for successful tumor colonization was 2e4 CFU, in which half of the mice showed tumor colonization. Injection of 2e5 and 2e6 CFU resulted in colonization of all tumors, and numbers of bacteria in the tumors increased. However, at higher concentrations, bacterial counts became detectable in the liver and the spleen.

[1159] In some embodiments, the microorganisms of the disclosure may be administered orally. In some embodiments, the genetically engineered bacteria may be useful in the prevention, treatment or management of liver cancer or liver metastases. For example, Danino et al showed that orally administered E. coli Nissle is able to colonize liver metastases by crossing the gastrointestinal tract in a mouse model of liver metastases (Danino et al., Programmable probiotics for detection of cancer in urine. Science Translational Medicine, 7 (289): 1-10, the contents of which is herein incorporated by reference in its entirety).

[1160] In one embodiment, the genetically engineered microorganism is delivered by intratumor injection. In one embodiment, the genetically engineered microorganisms is delivered intrapleurally. In one embodiment, the genetically engineered microorganism is delivered subcutaneously. In one embodiment, the genetically engineered microorganism is delivered intravenously. In one embodiment, the genetically engineered microorganism is delivered intrapleurally.

[1161] In some embodiments, the genetically engineered microorganisms of the invention may be administered intratumorally according to a regimen which requires multiple injections. In some embodiments, the same bacterial strains are administered in each intratumoral injection. In some embodiments, a first strain is injected first and a second strain is injected at a later timepoint. For example, a strain capable of producing an immune initiator, e.g., STING agonist, may be administered concurrently or sequentially with a strain capable or producing another immune initiator, e.g., a co-stimulatory molecule, e.g., agonistic anti-OX40, 41BB, or GITR. Additional injections of the two immune initiators, either concurrently or sequentially, can follow. In another example, a strain capable of producing an immune initiator, e.g., STING agonist, may be administered first, and a strain capable of producing an immune sustainer, e.g., kynurenine consumption, or anti-PD-1/anti-PD-L1 secretion or anti-PD-1/anti-PD-L1 surface display, may be administered second. Additional injections of STING agonist producing strains and/or anti-PD-1/anti-PD-L1 producing strains can follow. In any of these examples, optionally, a tumor biopsy may be taken concurrently with the intratumor injection. Optionally, antibiotics can be used to clear a first strain from the tumor before injection of a second strain. Alternatively, an auxotrophic modification, e.g., mutation in the dapA gene, which limits colonization, can be incorporated into the first strain, which may eliminate the bacteria of the first strain prior to injection of a second strain.

[1162] Tumor types into which the engineered bacteria or virus of the current invention are intratumorally delivered include locally advanced and metastatic tumors, including but not limited to, B, T, and NK cell lymphomas, colon and rectal cancers, melanoma, including metastatic melanoma, mycosis fungoides, Merkel carcinoma, liver cancer, including hepatocellular carcinoma and liver metastasis secondary to colorectal cancer, pancreatic cancer, breast cancer, follicular lymphoma, prostate cancer, refractory liver cancer, and Merkel cell carcinoma.

[1163] In some embodiments, tumor cell lysis occurs as part of the intratumor injection. As result, tumor antigens may exposed eliciting an anti-tumor response. This exposure may work together with the effector expressed by the bacteria to enhance the anti-tumor effect. In some embodiments, tumor cell lysis does not occur as part of the intratumor injection.

[1164] The genetically engineered microorganisms disclosed herein may be administered topically and formulated in the form of an ointment, cream, transdermal patch, lotion, gel, shampoo, spray, aerosol, solution, emulsion, or other form well known to one of skill in the art. See, e.g., “Remington's Pharmaceutical Sciences,” Mack Publishing Co., Easton, Pa. In an embodiment, for non-sprayable topical dosage forms, viscous to semi-solid or solid forms comprising a carrier or one or more excipients compatible with topical application and having a dynamic viscosity greater than water are employed. Suitable formulations include, but are not limited to, solutions, suspensions, emulsions, creams, ointments, powders, liniments, salves, etc., which may be sterilized or mixed with auxiliary agents (e.g., preservatives, stabilizers, wetting agents, buffers, or salts) for influencing various properties, e.g., osmotic pressure. Other suitable topical dosage forms include sprayable aerosol preparations wherein the active ingredient in combination with a solid or liquid inert carrier, is packaged in a mixture with a pressurized volatile (e.g., a gaseous propellant, such as freon) or in a squeeze bottle. Moisturizers or humectants can also be added to pharmaceutical compositions and dosage forms. Examples of such additional ingredients are well known in the art. In one embodiment, the pharmaceutical composition comprising the recombinant bacteria of the invention may be formulated as a hygiene product. For example, the hygiene product may be an antibacterial formulation, or a fermentation product such as a fermentation broth. Hygiene products may be, for example, shampoos, conditioners, creams, pastes, lotions, and lip balms.

[1165] The genetically engineered microorganisms disclosed herein may be administered orally and formulated as tablets, pills, dragees, capsules, liquids, gels, syrups, slurries, suspensions, etc. Pharmacological compositions for oral use can be made using a solid excipient, optionally grinding the resulting mixture, and processing the mixture of granules, after adding suitable auxiliaries if desired, to obtain tablets or dragee cores. Suitable excipients include, but are not limited to, fillers such as sugars, including lactose, sucrose, mannitol, or sorbitol; cellulose compositions such as maize starch, wheat starch, rice starch, potato starch, gelatin, gum tragacanth, methyl cellulose, hydroxypropylmethyl-cellulose, sodium carbomethylcellulose; and/or physiologically acceptable polymers such as polyvinylpyrrolidone (PVP) or polyethylene glycol (PEG). Disintegrating agents may also be added, such as cross-linked polyvinylpyrrolidone, agar, alginic acid or a salt thereof such as sodium alginate.

[1166] Tablets or capsules can be prepared by conventional means with pharmaceutically acceptable excipients such as binding agents (e.g., pregelatinized maize starch, polyvinylpyrrolidone, hydroxypropyl methylcellulose, carboxymethylcellulose, polyethylene glycol, sucrose, glucose, sorbitol, starch, gum, kaolin, and tragacanth); fillers (e.g., lactose, microcrystalline cellulose, or calcium hydrogen phosphate); lubricants (e.g., calcium, aluminum, zinc, stearic acid, polyethylene glycol, sodium lauryl sulfate, starch, sodium benzoate, L-leucine, magnesium stearate, talc, or silica); disintegrants (e.g., starch, potato starch, sodium starch glycolate, sugars, cellulose derivatives, silica powders); or wetting agents (e.g., sodium lauryl sulphate). The tablets may be coated by methods well known in the art. A coating shell may be present, and common membranes include, but are not limited to, polylactide, polyglycolic acid, polyanhydride, other biodegradable polymers, alginate-polylysine-alginate (APA), alginate-polymethylene-co-guanidine-alginate (A-PMCG-A), hydroymethylacrylate-methyl methacrylate (HEMA-MMA), multilayered HEMA-MMA-MAA, polyacrylonitrilevinylchloride (PAN-PVC), acrylonitrile/sodium methallylsulfonate (AN-69), polyethylene glycol/poly pentamethylcyclopentasiloxane/polydimethylsiloxane (PEG/PD5/PDMS), poly N,N-dimethyl acrylamide (PDMAAm), siliceous encapsulates, cellulose sulphate/sodium alginate/polymethylene-co-guanidine (CS/A/PMCG), cellulose acetate phthalate, calcium alginate, k-carrageenan-locust bean gum gel beads, gellan-xanthan beads, poly(lactide-co-glycolides), carrageenan, starch poly-anhydrides, starch polymethacrylates, polyamino acids, and enteric coating polymers.

[1167] In some embodiments, the genetically engineered bacteria are enterically coated for release into the gut or a particular region of the gut, for example, the large intestine. The typical pH profile from the stomach to the colon is about 1-4 (stomach), 5.5-6 (duodenum), 7.3-8.0 (ileum), and 5.5-6.5 (colon). In some diseases, the pH profile may be modified. In some embodiments, the coating is degraded in specific pH environments in order to specify the site of release. In some embodiments, at least two coatings are used. In some embodiments, the outside coating and the inside coating are degraded at different pH levels.

[1168] In some embodiments, enteric coating materials may be used, in one or more coating layers (e.g., outer, inner and/o intermediate coating layers). Enteric coated polymers remain unionized at low pH, and therefore remain insoluble. But as the pH increases in the gastrointestinal tract, the acidic functional groups are capable of ionization, and the polymer swells or becomes soluble in the intestinal fluid.

[1169] Materials used for enteric coatings include Cellulose acetate phthalate (CAP), Poly(methacrylic acid-co-methyl methacrylate), Cellulose acetate trimellitate (CAT), Poly(vinyl acetate phthalate) (PVAP) and Hydroxypropyl methylcellulose phthalate (HPMCP), fatty acids, waxes, Shellac (esters of aleurtic acid), plastics and plant fibers. Additionally, Zein, Aqua-Zein (an aqueous zein formulation containing no alcohol), amylose starch and starch derivatives, and dextrins (e.g., maltodextrin) are also used. Other known enteric coatings include ethylcellulose, methylcellulose, hydroxypropyl methylcellulose, amylose acetate phthalate, cellulose acetate phthalate, hydroxyl propyl methyl cellulose phthalate, an ethylacrylate, and a methylmethacrylate.

[1170] Coating polymers also may comprise one or more of, phthalate derivatives, CAT, HPMCAS, polyacrylic acid derivatives, copolymers comprising acrylic acid and at least one acrylic acid ester, Eudragit™ S (poly(methacrylic acid, methyl methacrylate)1:2); Eudragit L100™ S (poly(methacrylic acid, methyl methacrylate)1:1); Eudragit L30D™, (poly(methacrylic acid, ethyl acrylate)1:1); and (Eudragit L100-55) (poly(methacrylic acid, ethyl acrylate)1:1) (Eudragit™ L is an anionic polymer synthesized from methacrylic acid and methacrylic acid methyl ester), polymethyl methacrylate blended with acrylic acid and acrylic ester copolymers, alginic acid, ammonia alginate, sodium, potassium, magnesium or calcium alginate, vinyl acetate copolymers, polyvinyl acetate 30D (30% dispersion in water), a neutral methacrylic ester comprising poly(dimethylaminoethylacrylate) (“Eudragit E™), a copolymer of methylmethacrylate and ethylacrylate with trimethylammonioethyl methacrylate chloride, a copolymer of methylmethacrylate and ethylacrylate, Zein, shellac, gums, or polysaccharides, or a combination thereof.

[1171] Coating layers may also include polymers which contain Hydroxypropylmethylcellulose (HPMC), Hydroxypropylethylcellulose (HPEC), Hydroxypropylcellulose (HPC), hydroxypropylethylcellulose (HPEC), hydroxymethylpropylcellulose (HMPC), ethylhydroxyethylcellulose (EHEC) (Ethulose), hydroxyethylmethylcellulose (HEMC), hydroxymethylethylcellulose (HMEC), propylhydroxyethylcellulose (PHEC), methylhydroxyethylcellulose (M H EC), hydrophobically modified hydroxyethylcellulose (NEXTON), carboxymethyl hydroxyethylcellulose (CMHEC), Methylcellulose, Ethylcellulose, water soluble vinyl acetate copolymers, gums, polysaccharides such as alginic acid and alginates such as ammonia alginate, sodium alginate, potassium alginate, acid phthalate of carbohydrates, amylose acetate phthalate, cellulose acetate phthalate (CAP), cellulose ester phthalates, cellulose ether phthalates, hydroxypropylcellulose phthalate (HPCP), hydroxypropylethylcellulose phthalate (HPECP), hydroxyproplymethylcellulose phthalate (HPMCP), hydroxyproplymethylcellulose acetate succinate (HPMCAS).

[1172] In some embodiments, the genetically engineered microorganisms are enterically coated for release into the gut or a particular region of the gut, for example, the large intestine. The typical pH profile from the stomach to the colon is about 1-4 (stomach), 5.5-6 (duodenum), 7.3-8.0 (ileum), and 5.5-6.5 (colon). In some diseases, the pH profile may be modified. In some embodiments, the coating is degraded in specific pH environments in order to specify the site of release. In some embodiments, at least two coatings are used. In some embodiments, the outside coating and the inside coating are degraded at different pH levels.

[1173] Liquid preparations for oral administration may take the form of solutions, syrups, suspensions, or a dry product for constitution with water or other suitable vehicle before use. Such liquid preparations may be prepared by conventional means with pharmaceutically acceptable agents such as suspending agents (e.g., sorbitol syrup, cellulose derivatives, or hydrogenated edible fats); emulsifying agents (e.g., lecithin or acacia); non-aqueous vehicles (e.g., almond oil, oily esters, ethyl alcohol, or fractionated vegetable oils); and preservatives (e.g., methyl or propyl-p-hydroxybenzoates or sorbic acid). The preparations may also contain buffer salts, flavoring, coloring, and sweetening agents as appropriate. Preparations for oral administration may be suitably formulated for slow release, controlled release, or sustained release of the genetically engineered microorganisms described herein.

[1174] In one embodiment, the genetically engineered microorganisms of the disclosure may be formulated in a composition suitable for administration to pediatric subjects. As is well known in the art, children differ from adults in many aspects, including different rates of gastric emptying, pH, gastrointestinal permeability, etc. (Ivanovska et al., Pediatrics, 134(2):361-372, 2014). Moreover, pediatric formulation acceptability and preferences, such as route of administration and taste attributes, are critical for achieving acceptable pediatric compliance. Thus, in one embodiment, the composition suitable for administration to pediatric subjects may include easy-to-swallow or dissolvable dosage forms, or more palatable compositions, such as compositions with added flavors, sweeteners, or taste blockers. In one embodiment, a composition suitable for administration to pediatric subjects may also be suitable for administration to adults.

[1175] In one embodiment, the composition suitable for administration to pediatric subjects may include a solution, syrup, suspension, elixir, powder for reconstitution as suspension or solution, dispersible/effervescent tablet, chewable tablet, gummy candy, lollipop, freezer pop, troche, chewing gum, oral thin strip, orally disintegrating tablet, sachet, soft gelatin capsule, sprinkle oral powder, or granules. In one embodiment, the composition is a gummy candy, which is made from a gelatin base, giving the candy elasticity, desired chewy consistency, and longer shelf-life. In some embodiments, the gummy candy may also comprise sweeteners or flavors.

[1176] In one embodiment, the composition suitable for administration to pediatric subjects may include a flavor. As used herein, “flavor” is a substance (liquid or solid) that provides a distinct taste and aroma to the formulation. Flavors also help to improve the palatability of the formulation. Flavors include, but are not limited to, strawberry, vanilla, lemon, grape, bubble gum, and cherry.

[1177] In certain embodiments, the genetically engineered microorganisms may be orally administered, for example, with an inert diluent or an assimilable edible carrier. The compound may also be enclosed in a hard or soft shell gelatin capsule, compressed into tablets, or incorporated directly into the subject's diet. For oral therapeutic administration, the compounds may be incorporated with excipients and used in the form of ingestible tablets, buccal tablets, troches, capsules, elixirs, suspensions, syrups, wafers, and the like. To administer a compound by other than parenteral administration, it may be necessary to coat the compound with, or co-administer the compound with, a material to prevent its inactivation.

[1178] In another embodiment, the pharmaceutical composition comprising the recombinant bacteria of the invention may be a comestible product, for example, a food product. In one embodiment, the food product is milk, concentrated milk, fermented milk (yogurt, sour milk, frozen yogurt, lactic acid bacteria-fermented beverages), milk powder, ice cream, cream cheeses, dry cheeses, soybean milk, fermented soybean milk, vegetable-fruit juices, fruit juices, sports drinks, confectionery, candies, infant foods (such as infant cakes), nutritional food products, animal feeds, or dietary supplements. In one embodiment, the food product is a fermented food, such as a fermented dairy product. In one embodiment, the fermented dairy product is yogurt. In another embodiment, the fermented dairy product is cheese, milk, cream, ice cream, milk shake, or kefir. In another embodiment, the recombinant bacteria of the invention are combined in a preparation containing other live bacterial cells intended to serve as probiotics. In another embodiment, the food product is a beverage. In one embodiment, the beverage is a fruit juice-based beverage or a beverage containing plant or herbal extracts. In another embodiment, the food product is a jelly or a pudding. Other food products suitable for administration of the recombinant bacteria of the invention are well known in the art. For example, see U.S. 2015/0359894 and US 2015/0238545, the entire contents of each of which are expressly incorporated herein by reference. In yet another embodiment, the pharmaceutical composition of the invention is injected into, sprayed onto, or sprinkled onto a food product, such as bread, yogurt, or cheese.

[1179] In some embodiments, the composition is formulated for intraintestinal administration, intrajejunal administration, intraduodenal administration, intraileal administration, gastric shunt administration, or intracolic administration, via nanoparticles, nanocapsules, microcapsules, or microtablets, which are enterically coated or uncoated. The pharmaceutical compositions may also be formulated in rectal compositions such as suppositories or retention enemas, using, e.g., conventional suppository bases such as cocoa butter or other glycerides. The compositions may be suspensions, solutions, or emulsions in oily or aqueous vehicles, and may contain suspending, stabilizing and/or dispersing agents.

[1180] The genetically engineered microorganisms described herein may be administered intranasally, formulated in an aerosol form, spray, mist, or in the form of drops, and conveniently delivered in the form of an aerosol spray presentation from pressurized packs or a nebuliser, with the use of a suitable propellant (e.g., dichlorodifluoromethane, trichlorofluoromethane, dichlorotetrafluoroethane, carbon dioxide or other suitable gas). Pressurized aerosol dosage units may be determined by providing a valve to deliver a metered amount. Capsules and cartridges (e.g., of gelatin) for use in an inhaler or insufflator may be formulated containing a powder mix of the compound and a suitable powder base such as lactose or starch.

[1181] The genetically engineered microorganisms may be administered and formulated as depot preparations. Such long acting formulations may be administered by implantation or by injection, including intravenous injection, subcutaneous injection, local injection, direct injection, or infusion. For example, the compositions may be formulated with suitable polymeric or hydrophobic materials (e.g., as an emulsion in an acceptable oil) or ion exchange resins, or as sparingly soluble derivatives (e.g., as a sparingly soluble salt).

[1182] In some embodiments, disclosed herein are pharmaceutically acceptable compositions in single dosage forms. Single dosage forms may be in a liquid or a solid form. Single dosage forms may be administered directly to a patient without modification or may be diluted or reconstituted prior to administration. In certain embodiments, a single dosage form may be administered in bolus form, e.g., single injection, single oral dose, including an oral dose that comprises multiple tablets, capsule, pills, etc. In alternate embodiments, a single dosage form may be administered over a period of time, e.g., by infusion.

[1183] Single dosage forms of the pharmaceutical composition may be prepared by portioning the pharmaceutical composition into smaller aliquots, single dose containers, single dose liquid forms, or single dose solid forms, such as tablets, granulates, nanoparticles, nanocapsules, microcapsules, microtablets, pellets, or powders, which may be enterically coated or uncoated. A single dose in a solid form may be reconstituted by adding liquid, typically sterile water or saline solution, prior to administration to a patient.

[1184] In other embodiments, the composition can be delivered in a controlled release or sustained release system. In one embodiment, a pump may be used to achieve controlled or sustained release. In another embodiment, polymeric materials can be used to achieve controlled or sustained release of the therapies of the present disclosure (see e.g., U.S. Pat. No. 5,989,463). Examples of polymers used in sustained release formulations include, but are not limited to, poly(2-hydroxy ethyl methacrylate), poly(methyl methacrylate), poly(acrylic acid), poly(ethylene-co-vinyl acetate), poly(methacrylic acid), polyglycolides (PLG), polyanhydrides, poly(N-vinyl pyrrolidone), poly(vinyl alcohol), polyacrylamide, poly(ethylene glycol), polylactides (PLA), poly(lactide-co-glycolides) (PLGA), and polyorthoesters. The polymer used in a sustained release formulation may be inert, free of leachable impurities, stable on storage, sterile, and biodegradable. In some embodiments, a controlled or sustained release system can be placed in proximity of the prophylactic or therapeutic target, thus requiring only a fraction of the systemic dose. Any suitable technique known to one of skill in the art may be used.

[1185] Dosage regimens may be adjusted to provide a therapeutic response. Dosing can depend on several factors, including severity and responsiveness of the disease, route of administration, time course of treatment (days to months to years), and time to amelioration of the disease. For example, a single bolus may be administered at one time, several divided doses may be administered over a predetermined period of time, or the dose may be reduced or increased as indicated by the therapeutic situation. The specification for the dosage is dictated by the unique characteristics of the active compound and the particular therapeutic effect to be achieved. Dosage values may vary with the type and severity of the condition to be alleviated. For any particular subject, specific dosage regimens may be adjusted over time according to the individual need and the professional judgment of the treating clinician. Toxicity and therapeutic efficacy of compounds provided herein can be determined by standard pharmaceutical procedures in cell culture or animal models. For example, LD₅₀, ED₅₀, EC₅₀, and IC₅₀ may be determined, and the dose ratio between toxic and therapeutic effects (LD₅₀/ED₅₀) may be calculated as the therapeutic index. Compositions that exhibit toxic side effects may be used, with careful modifications to minimize potential damage to reduce side effects. Dosing may be estimated initially from cell culture assays and animal models. The data obtained from in vitro and in vivo assays and animal studies can be used in formulating a range of dosage for use in humans.

[1186] The ingredients are supplied either separately or mixed together in unit dosage form, for example, as a dry lyophilized powder or water-free concentrate in a hermetically sealed container such as an ampoule or sachet indicating the quantity of active agent. If the mode of administration is by injection, an ampoule of sterile water for injection or saline can be provided so that the ingredients may be mixed prior to administration.

[1187] The pharmaceutical compositions may be packaged in a hermetically sealed container such as an ampoule or sachet indicating the quantity of the agent. In one embodiment, one or more of the pharmaceutical compositions is supplied as a dry sterilized lyophilized powder or water-free concentrate in a hermetically sealed container and can be reconstituted (e.g., with water or saline) to the appropriate concentration for administration to a subject. In an embodiment, one or more of the prophylactic or therapeutic agents or pharmaceutical compositions is supplied as a dry sterile lyophilized powder in a hermetically sealed container stored between 2° C. and 8° C. and administered within 1 hour, within 3 hours, within 5 hours, within 6 hours, within 12 hours, within 24 hours, within 48 hours, within 72 hours, or within one week after being reconstituted. Cryoprotectants can be included for a lyophilized dosage form, principally 0-10% sucrose (optimally 0.5-1.0%). Other suitable cryoprotectants include trehalose and lactose. Other suitable bulking agents include glycine and arginine, either of which can be included at a concentration of 0-0.05%, and polysorbate-80 (optimally included at a concentration of 0.005-0.01%). Additional surfactants include but are not limited to polysorbate 20 and BRIJ surfactants. The pharmaceutical composition may be prepared as an injectable solution and can further comprise an agent useful as an adjuvant, such as those used to increase absorption or dispersion, e.g., hyaluronidase.

[1188] In some embodiments, the genetically engineered microorganisms and composition thereof is formulated for intravenous administration, intratumor administration, or peritumor administration. The genetically engineered microorganisms may be formulated as depot preparations. Such long acting formulations may be administered by implantation or by injection. For example, the compositions may be formulated with suitable polymeric or hydrophobic materials (e.g., as an emulsion in an acceptable oil) or ion exchange resins, or as sparingly soluble derivatives (e.g., as a sparingly soluble salt).

[1189] In some embodiments, the genetically engineered OVs are prepared for delivery, taking into consideration the need for efficient delivery and for overcoming the host antiviral immune response. Approaches to evade antiviral response include the administration of different viral serotypes as part of the treatment regimen (serotype switching), formulation, such as polymer coating to mask the virus from antibody recognition and the use of cells as delivery vehicles.

[1190] In another embodiment, the composition can be delivered in a controlled release or sustained release system. In one embodiment, a pump may be used to achieve controlled or sustained release. In another embodiment, polymeric materials can be used to achieve controlled or sustained release of the therapies of the present disclosure (see e.g., U.S. Pat. No. 5,989,463). Examples of polymers used in sustained release formulations include, but are not limited to, poly(2-hydroxy ethyl methacrylate), poly(methyl methacrylate), poly(acrylic acid), poly(ethylene-co-vinyl acetate), poly(methacrylic acid), polyglycolides (PLG), polyanhydrides, poly(N-vinyl pyrrolidone), poly(vinyl alcohol), polyacrylamide, poly(ethylene glycol), polylactides (PLA), poly(lactide-co-glycolides) (PLGA), and polyorthoesters. The polymer used in a sustained release formulation may be inert, free of leachable impurities, stable on storage, sterile, and biodegradable. In some embodiments, a controlled or sustained release system can be placed in proximity of the prophylactic or therapeutic target, thus requiring only a fraction of the systemic dose. Any suitable technique known to one of skill in the art may be used.

[1191] The genetically engineered bacteria of the invention may be administered and formulated as neutral or salt forms. Pharmaceutically acceptable salts include those formed with anions such as those derived from hydrochloric, phosphoric, acetic, oxalic, tartaric acids, etc., and those formed with cations such as those derived from sodium, potassium, ammonium, calcium, ferric hydroxides, isopropylamine, triethylamine, 2-ethylamino ethanol, histidine, procaine, etc.

### Methods of Treatment

[1192] Another aspect of the invention provides methods of treating cancer. In some embodiments, the invention provides methods for reducing, ameliorating, or eliminating one or more symptom(s) associated with cancer. In some embodiments, the cancer is selected from adrenal cancer, adrenocortical carcinoma, anal cancer, appendix cancer, bile duct cancer, bladder cancer, bone cancer (e.g., Ewing sarcoma tumors, osteosarcoma, malignant fibrous histiocytoma), brain cancer (e.g., astrocytomas, brain stem glioma, craniopharyngioma, ependymoma), bronchial tumors, central nervous system tumors, breast cancer, Castleman disease, cervical cancer, colon cancer, rectal cancer, colorectal cancer, endometrial cancer, esophageal cancer, eye cancer, gallbladder cancer, gastrointestinal cancer, gastrointestinal carcinoid tumors, gastrointestinal stromal tumors, gestational trophoblastic disease, heart cancer, Kaposi sarcoma, kidney cancer, laryngeal cancer, hypopharyngeal cancer, leukemia (e.g., acute lymphoblastic leukemia, acute myeloid leukemia, chronic lymphocytic leukemia, chronic myelogenous leukemia), liver cancer, lung cancer, lymphoma (e.g., AIDS-related lymphoma, Burkitt lymphoma, cutaneous T cell lymphoma, Hogkin lymphoma, Non-Hogkin lymphoma, primary central nervous system lymphoma), malignant mesothelioma, multiple myeloma, myelodysplastic syndrome, nasal cavity cancer, paranasal sinus cancer, nasopharyngeal cancer, neuroblastoma, oral cavity cancer, oropharyngeal cancer, osteosarcoma, ovarian cancer, pancreatic cancer, penile cancer, pituitary tumors, prostate cancer, retinoblastoma, rhabdomyosarcoma, rhabdoid tumor, salivary gland cancer, sarcoma, skin cancer (e.g., basal cell carcinoma, melanoma), small intestine cancer, stomach cancer, teratoid tumor, testicular cancer, throat cancer, thymus cancer, thyroid cancer, unusual childhood cancers, urethral cancer, uterine cancer, uterine sarcoma, vaginal cancer, vulvar cancer, Waldenström macroglobulinemia, and Wilms tumor. In some embodiments, the symptom(s) associated thereof include, but are not limited to, anemia, loss of appetite, irritation of bladder lining, bleeding and bruising (thrombocytopenia), changes in taste or smell, constipation, diarrhea, dry mouth, dysphagia, edema, fatigue, hair loss (alopecia), infection, infertility, lymphedema, mouth sores, nausea, pain, peripheral neuropathy, tooth decay, urinary tract infections, and/or problems with memory and concentration.

[1193] The method may comprise preparing a pharmaceutical composition with at least one genetically engineered species, strain, or subtype of bacteria described herein, and administering the pharmaceutical composition to a subject in a therapeutically effective amount. The genetically engineered microorganisms may be administered locally, e.g., intratumorally or peritumorally into a tissue or supplying vessel, or systemically, e.g., intravenously by infusion or injection. In some embodiments, the genetically engineered bacteria are administered intravenously, intratumorally, intra-arterially, intramuscularly, intraperitoneally, orally, or topically. In some embodiments, the genetically engineered microorganisms are administered intravenously, i.e., systemically.

[1194] In certain embodiments, administering the pharmaceutical composition to the subject reduces cell proliferation, tumor growth, and/or tumor volume in a subject. In some embodiments, the methods of the present disclosure may reduce cell proliferation, tumor growth, and/or tumor volume by at least about 10% to 20%, 20% to 25%, 25% to 30%, 30% to 40%, 40% to 50%, 50% to 60%, 60% to 70%, 70% to 75%, 75% to 80%, 80% to 85%, 85% to 90%, 90% to 95%, 95% to 99%, or more as compared to levels in an untreated or control subject. In some embodiments, reduction is measured by comparing cell proliferation, tumor growth, and/or tumor volume in a subject before and after administration of the pharmaceutical composition. In some embodiments, the method of treating or ameliorating a cancer in a subject allows one or more symptoms of the cancer to improve by at least about 10%, 20%, 30%, 40%, 50%, 60%, 70%, 80%, 90%, 95%, or more.

[1195] Before, during, and after the administration of the pharmaceutical composition, cancerous cells and/or biomarkers in a subject may be measured in a biological sample, such as blood, serum, plasma, urine, peritoneal fluid, and/or a biopsy from a tissue or organ. In some embodiments, the methods may include administration of the compositions of the invention to reduce tumor volume in a subject to an undetectable size, or to less than about 1%, 2%, 5%, 10%, 20%, 25%, 30%, 40%, 50%, 60%, 70%, 75%, 80%, or 90% of the subject's tumor volume prior to treatment. In other embodiments, the methods may include administration of the compositions of the invention to reduce the cell proliferation rate or tumor growth rate in a subject to an undetectable rate, or to less than about 1%, 2%, 5%, 10%, 20%, 25%, 30%, 40%, 50%, 60%, 70%, 75%, 80%, or 90% of the rate prior to treatment.

[1196] For genetically engineered microorganisms expressing immune-based immune modulators, responses patterns may be different than for traditional cytotoxic therapies. For example, tumors treated with immune-based therapies may enlarge before they regress, and/or new lesions may appear (Agarwala et al., 2015). Increased tumor size may be due to heavy infiltration with lymphocytes and macrophages that are normally not present in tumor tissue. Additionally, response times may be slower than response times associated with standard therapies, e.g., cytotoxic therapies. In some embodiments, delivery of the immune modulator may modulate the growth of a subject's tumor and/or ameliorate the symptoms of a cancer while temporarily increasing the volume and/or size of the tumor.

[1197] The genetically engineered bacteria may be destroyed, e.g., by defense factors in tissues or blood serum (Sonnenborn et al., 2009), or by activation of a kill switch, several hours or days after administration. Thus, the pharmaceutical composition comprising the gene or gene cassette for producing the immune modulator may be re-administered at a therapeutically effective dose and frequency. In alternate embodiments, the genetically engineered bacteria are not destroyed within hours or days after administration and may propagate in the tumor and colonize the tumor.

[1198] The pharmaceutical composition may be administered alone or in combination with one or more additional therapeutic agents, e.g., a chemotherapeutic drug or a checkpoint inhibitor, e.g., as described herein and known in the art. An important consideration in selecting the one or more additional therapeutic agents is that the agent(s) should be compatible with the genetically engineered bacteria of the invention, e.g., the agent(s) must not kill the bacteria. In some studies, the efficacy of anticancer immunotherapy, e.g., CTLA-4 or PD-1 inhibitors, requires the presence of particular bacterial strains in the microbiome (Ilda et al., 2013; Vetizou et al., 2015; Sivan et al., 2015). In some embodiments, the pharmaceutical composition comprising the bacteria augments the effect of a checkpoint inhibitor or a chemotherapeutic agent, e.g., allowing lowering of a the dose of systemically administrated chemotherapeutic or immunotherapeutic agents. In some embodiments, the pharmaceutical composition is administered with one or more commensal or probiotic bacteria, e.g., Bifidobacterium or Bacteroides.

[1199] In certain embodiments, the pharmaceutical composition may be administered to a subject for treating cancer by administering a first genetically engineered bacterium to the subject, wherein the first genetically engineered bacterium comprises at least one gene encoding a first immune initiator; and administering a second genetically engineered bacterium to the subject, wherein the second genetically engineered bacterium comprising at least one gene encoding a second immune initiator. In some embodiments, the administering steps are performed at the same time. In some embodiments, administering the first genetically engineered bacterium to the subject occurs before the administering of the second genetically engineered bacterium to the subject. In some embodiments, administering of the second genetically engineered bacterium to the subject occurs before the administering of the first genetically engineered bacterium to the subject. In some embodiments, the ratio of the first genetically engineered bacterium to the second genetically engineered bacterium is 5:1, 4:1, 3:1, 2:1, 1:1, 1:2, 1:3, 1:4, or 1:5. In some embodiments, the ratio of the second genetically engineered bacterium to the first genetically engineered bacterium is 5:1, 4:1, 3:1, 2:1, 1:1, 1:2, 1:3, 1:4, or 1:5.

### Chemotherapeutic Agents

[1200] In some embodiments, the genetically engineered bacteria are administered sequentially, simultaneously, or subsequently to dosing with one or more chemotherapeutic agents. In some embodiments, the genetically engineered bacteria are administered sequentially, simultaneously, or subsequently to dosing with one or more chemotherapeutic agents selected from Trabectedin®, Belotecan®, Cisplatin®, Carboplatin®, Bevacizumab®, Pazopanib®, 5-Fluorouracil, Capecitabine®, Irinotecan®, and Oxaliplatin®. In some embodiments, the genetically engineered bacteria are administered sequentially, simultaneously, or subsequently to dosing with gemcitabine (Gemzar). In some embodiments, the genetically engineered bacteria are administered sequentially, simultaneously, or subsequently to dosing with cyclophosphamide. In any of these embodiments, the one or more bacteria are administered systemically or orally or intratumorally.

[1201] In some embodiments, one or more engineered bacteria described herein which comprise gene sequence(s) encoding enzymes for the production or consumption of a metabolite, e.g., kynurenine or adenosine consumers ammonia consumers, arginine producers and/or STING agonist producers, are administered sequentially, simultaneously, or subsequently to dosing with one or more chemotherapeutic agents. In some embodiments, the chemotherapeutic agent is administered systemically, and the bacteria are administered intratumorally. In some embodiments, the chemotherapeutic agent and bacteria are administered systemically. In some embodiments, one or more engineered bacteria described herein, which comprise gene sequence(s) encoding a metabolic converter, e.g., kynurenine, consumers, adenosine consumers, arginine producers, ammonia consumers and/or STING agonist producers and/or ammonia consumers, are administered sequentially, simultaneously, or subsequently to dosing with a chemotherapeutic agent. In one embodiment, the chemotherapeutic agent is cyclophosphamide.

[1202] In some embodiments, one or more engineered bacteria expressing any one or more of the described circuits for the degradation of adenosine are administered sequentially, simultaneously, or subsequently to dosing a chemotherapeutic agent. In one embodiment, the chemotherapeutic agent is cyclophosphamide. In some embodiments, genetically engineered bacteria expressing any one or more of the described circuits for the consumption of kynurenine are administered sequentially, simultaneously, or subsequently to dosing with a chemotherapeutic agent. In one embodiment, the chemotherapeutic agent is cyclophosphamide. In some embodiments, genetically engineered bacteria expressing any one or more of the described circuits for the production of arginine are administered sequentially, simultaneously, or subsequently to dosing with a chemotherapeutic agent. In some embodiments, genetically engineered bacteria expressing any one or more of the described circuits for the consumption and/or arginine production are administered sequentially, simultaneously, or subsequently to dosing with a chemotherapeutic agent. In one embodiment, the chemotherapeutic agent is cyclophosphamide.

[1203] In some embodiments, the one or more engineered bacteria, e.g., adenosine consumer, kynurenine consumer, ammonia consumer, arginine producer, are able to improve anti-tumor activity (e.g., tumor proliferation, size, volume, weight) of the co-administered chemotherapeutic agent (e.g., cyclophosphamide or another agent described herein or known in the art), e.g., by 10% to 20%, 20% to 25%, 25% to 30%, 30% to 40%, 40% to 50%, 50% to 60%, 60% to 70%, 70% to 75%, 75% to 80%, 80% to 85%, 85% to 90%, 90% to 95%, 95% to 99%, or more as compared to a chemotherapy alone under the same conditions or as compared to an unmodified bacteria of the same subtype under the same conditions. In some embodiments, the genetically engineered bacteria, e.g., adenosine consumer, kynurenine consumer, arginine producer, are able to improve anti-tumor activity (e.g., tumor proliferation, size, volume, weight) of the co-administered chemotherapeutic agent (e.g., cyclophosphamide or another agent described herein or known in the art), e.g., 1.0-1.2-fold, 1.2-1.4-fold, 1.4-1.6-fold, 1.6-1.8-fold, 1.8-2-fold, or two-fold more or more as compared to a chemotherapy alone under the same conditions or as compared to an unmodified bacteria of the same subtype under the same conditions. In some embodiments, the genetically engineered bacteria, e.g., adenosine consumer, kynurenine consumer, arginine producer, are able to improve anti-tumor activity (e.g., tumor proliferation, size, volume, weight) of the co-administered chemotherapeutic agent (e.g., cyclophosphamide or another agent described herein or known in the art), e.g., about three-fold, four-fold, about three-fold, four-fold, five-fold, six-fold, seven-fold, eight-fold, nine-fold, ten-fold, fifteen-fold, twenty-fold, thirty-fold, forty-fold, fifty-fold, hundred-fold, five hundred-fold, or one-thousand-fold more or more as compared to a chemotherapy alone under the same conditions or as compared to an unmodified bacteria of the same subtype under the same conditions.

[1204] In some embodiments, one or more engineered bacteria described herein, which comprise gene sequence(s) for the production of an effector for immune activation and priming, are administered sequentially, simultaneously, or subsequently to dosing with a chemotherapeutic agent. In some embodiments, the chemotherapeutic agent is administered systemically, and the bacteria are administered intratumorally. In some embodiments, the chemotherapeutic agent and bacteria are administered systemically.

[1205] In some embodiments, the genetically engineered bacteria administered with the chemotherapeutic agent comprise gene sequence(s) encoding one or more enzymes for the production of one or more STING agonists. In some embodiments, one or more engineered bacteria described herein, which comprise gene sequence(s) encoding diadenylate cyclase and/or other STING agonist producing enzyme, such as human or bacterial cGAS, are administered sequentially, simultaneously, or subsequently to dosing with a chemotherapeutic agent. In one embodiment, the chemotherapeutic agent is cyclophosphamide.

[1206] In some embodiments, the genetically engineered bacteria expressing diadenylate cyclase, human or bacterial cGAS, and/or or other enzyme for the generation of STING agonist, are able to improve anti-tumor activity (e.g., tumor proliferation, size, volume, weight) of the co-administered chemotherapeutic agent (e.g., cyclophosphamide), e.g., by 10% to 20%, 20% to 25%, 25% to 30%, 30% to 40%, 40% to 50%, 50% to 60%, 60% to 70%, 70% to 75%, 75% to 80%, 80% to 85%, 85% to 90%, 90% to 95%, 95% to 99%, or more as compared to a chemotherapy alone under the same conditions or as compared to an unmodified bacteria of the same subtype under the same conditions. In some embodiments, the genetically engineered bacteria expressing diadenylate cyclase, cGAS, and/or other enzyme for the generation of STING agonist, are able to improve anti-tumor activity (e.g., tumor proliferation, size, volume, weight) of the co-administered chemotherapeutic agent (e.g., cyclophosphamide or another agent described herein or known in the art), e.g., 1.0-1.2-fold, 1.2-1.4-fold, 1.4-1.6-fold, 1.6-1.8-fold, 1.8-2-fold, or two-fold more or more as compared to a chemotherapy alone under the same conditions or as compared to an unmodified bacteria of the same subtype under the same conditions. In some embodiments, the genetically engineered bacteria expressing diadenylate cyclase or other enzyme for the generation of STING agonist, are able to improve anti-tumor activity (e.g., tumor proliferation, size, volume, weight) of the co-administered chemotherapeutic agent (e.g., cyclophosphamide or another agent described herein or known in the art), e.g., about three-fold, four-fold, about three-fold, four-fold, five-fold, six-fold, seven-fold, eight-fold, nine-fold, ten-fold, fifteen-fold, twenty-fold, thirty-fold, forty-fold, fifty-fold, hundred-fold, five hundred-fold, or one-thousand-fold more or more as compared to a chemotherapy alone under the same conditions or as compared to an unmodified bacteria of the same subtype under the same conditions.

[1207] In some embodiments, genetically engineered bacteria expressing any one or more of the described cytosine deaminases for the conversion of 5-FC to 5-FU are administered sequentially, simultaneously, or subsequently to dosing a chemotherapeutic agent. In one embodiment, the chemotherapeutic agent is cyclophosphamide.

[1208] In some embodiments, the genetically engineered bacteria administered with the chemotherapeutic agent comprise gene sequence(s) encoding one or more enzymes for the conversion of 5-FC to 5-FU. In some embodiments, the genetically engineered bacteria expressing cytosine deaminase for the conversion of 5-FC to 5-FU, are able to improve anti-tumor activity (e.g., tumor proliferation, size, volume, weight) of the co-administered chemotherapeutic agent (e.g., cyclophosphamide), e.g., by 10% to 20%, 20% to 25%, 25% to 30%, 30% to 40%, 40% to 50%, 50% to 60%, 60% to 70%, 70% to 75%, 75% to 80%, 80% to 85%, 85% to 90%, 90% to 95%, 95% to 99%, or more as compared to a chemotherapy alone under the same conditions or as compared to an unmodified bacteria of the same subtype under the same conditions.

[1209] In some embodiments, the genetically engineered bacteria expressing cytosine deaminase for the conversion of 5-FC to 5-FU, are able to improve anti-tumor activity (e.g., tumor proliferation, size, volume, weight) of the co-administered chemotherapeutic agent (e.g., cyclophosphamide or another agent described herein or known in the art), e.g., 1.0-1.2-fold, 1.2-1.4-fold, 1.4-1.6-fold, 1.6-1.8-fold, 1.8-2-fold, or two-fold more or more as compared to a chemotherapy alone under the same conditions or as compared to an unmodified bacteria of the same subtype under the same conditions. In some embodiments, the genetically engineered bacteria expressing cytosine deaminase for the conversion of 5-FC to 5-FU, are able to improve anti-tumor activity (e.g., tumor proliferation, size, volume, weight) of the co-administered chemotherapeutic agent (e.g., cyclophosphamide or another agent described herein or known in the art), e.g., about three-fold, four-fold, about three-fold, four-fold, five-fold, six-fold, seven-fold, eight-fold, nine-fold, ten-fold, fifteen-fold, twenty-fold, thirty-fold, forty-fold, fifty-fold, hundred-fold, five hundred-fold, or one-thousand-fold more or more as compared to a chemotherapy alone under the same conditions or as compared to an unmodified bacteria of the same subtype under the same conditions.

[1210] In some embodiments, one or more engineered bacteria described herein which comprise gene sequence(s) encoding enzymes for the production of a STING agonist in combination with gene sequence(s) encoding one or more enzymes for the degradation of adenosine, for kynurenine consumption, for ammonia consumption and/or arginine production, are administered sequentially, simultaneously, or subsequently to dosing with one or more chemotherapeutic reagents described herein. In any of these embodiments, the one or more chemotherapeutic reagent is administered systemically or orally or intratumorally. In any of these embodiments, the one or more bacteria are administered systemically or orally or intratumorally.

[1211] In some embodiments, in which one or more genetically engineered bacteria are combined with a chemotherapeutic agent, the genetically engineered bacteria are able to improve anti-tumor activity (e.g., tumor proliferation, size, volume, weight) of the co-administered chemotherapeutic agent (e.g., cyclophosphamide), e.g., by 10% to 20%, 20% to 25%, 25% to 30%, 30% to 40%, 40% to 50%, 50% to 60%, 60% to 70%, 70% to 75%, 75% to 80%, 80% to 85%, 85% to 90%, 90% to 95%, 95% to 99%, or more as compared to a chemotherapy alone under the same conditions or as compared to an unmodified bacteria of the same subtype under the same conditions. In some embodiments, one or more genetically engineered bacteria are able to improve anti-tumor activity (e.g., tumor proliferation, size, volume, weight) of the co-administered chemotherapeutic agent (e.g., cyclophosphamide or another agent described herein or known in the art), e.g., 1.0-1.2-fold, 1.2-1.4-fold, 1.4-1.6-fold, 1.6-1.8-fold, 1.8-2-fold, or two-fold more or more as compared to a chemotherapy alone under the same conditions or as compared to an unmodified bacteria of the same subtype under the same conditions. In some embodiments, one or more genetically engineered bacteria are able to improve anti-tumor activity (e.g., tumor proliferation, size, volume, weight) of the co-administered chemotherapeutic agent (e.g., cyclophosphamide or another agent described herein or known in the art), e.g., about three-fold, four-fold, about three-fold, four-fold, five-fold, six-fold, seven-fold, eight-fold, nine-fold, ten-fold, fifteen-fold, twenty-fold, thirty-fold, forty-fold, fifty-fold, hundred-fold, five hundred-fold, or one-thousand-fold more or more as compared to a chemotherapy alone under the same conditions or as compared to an unmodified bacteria of the same subtype under the same conditions.

[1212] In some embodiments, one or more genetically engineered bacteria comprising gene sequence(s) encoding one or more adenosine degradation enzyme(s) described herein are administered sequentially, simultaneously, or subsequently to dosing with gemcitabine. In some embodiments, the enzymes for adenosine consumption encoded by the genetically engineered bacteria comprise one or more of add, xapA, deoD, xdhA, xdhB, and xdhC and nupC. In some embodiments, the enzymes for adenosine consumption encoded by the genetically engineered bacteria comprise one or more of add, xapA, deoD, xdhA, xdhB, and xdhC and nupG. In some embodiments, one or more engineered bacteria described herein which comprise gene sequence(s) encoding anti-CD40 antibody for surface display or secretion, are administered sequentially, simultaneously, or subsequently to dosing with gemcitabine. In some embodiments, one or more engineered bacteria described herein which comprise gene sequence(s) encoding hyaluronidase for secretion or for surface display, are administered sequentially, simultaneously, or subsequently to dosing with gemcitabine. In any of these embodiments, the one or more bacteria are administered systemically or orally or intratumorally.

[1213] In some embodiments, in which the genetically engineered bacteria are combined with a gemcitabine, the genetically engineered bacteria are able to improve anti-tumor activity (e.g., tumor proliferation, size, volume, weight) of the co-administered chemotherapeutic agent (e.g., cyclophosphamide), e.g., by 10% to 20%, 20% to 25%, 25% to 30%, 30% to 40%, 40% to 50%, 50% to 60%, 60% to 70%, 70% to 75%, 75% to 80%, 80% to 85%, 85% to 90%, 90% to 95%, 95% to 99%, or more as compared to a chemotherapy alone under the same conditions or as compared to an unmodified bacteria of the same subtype under the same conditions. In some embodiments, the genetically engineered bacteria are able to improve anti-tumor activity (e.g., tumor proliferation, size, volume, weight) of the co-administered chemotherapeutic agent (e.g., cyclophosphamide or another agent described herein or known in the art), e.g., 1.0-1.2-fold, 1.2-1.4-fold, 1.4-1.6-fold, 1.6-1.8-fold, 1.8-2-fold, or two-fold more or more as compared to a chemotherapy alone under the same conditions or as compared to an unmodified bacteria of the same subtype under the same conditions. In some embodiments, the genetically engineered bacteria are able to improve anti-tumor activity (e.g., tumor proliferation, size, volume, weight) of the co-administered chemotherapeutic agent (e.g., cyclophosphamide or another agent described herein or known in the art), e.g., about three-fold, four-fold, about three-fold, four-fold, five-fold, six-fold, seven-fold, eight-fold, nine-fold, ten-fold, fifteen-fold, twenty-fold, thirty-fold, forty-fold, fifty-fold, hundred-fold, five hundred-fold, or one-thousand-fold more or more as compared to a chemotherapy alone under the same conditions or as compared to an unmodified bacteria of the same subtype under the same conditions.

### Checkpoint Inhibition

[1214] In certain embodiments, one or more genetically engineered bacteria are administered sequentially, simultaneously, or subsequently to dosing with one or more checkpoint inhibitors, immune stimulatory antibodies (inhibitory or agonistic) or other agonists known in the art or described herein. In certain embodiments, the one or more genetically engineered bacteria are administered sequentially, simultaneously, or subsequently to dosing with one checkpoint inhibitors, immune stimulatory antibodies (inhibitory or agonistic) or other agonists known in the art or described herein. In certain embodiments, the one or more genetically engineered bacteria are administered sequentially, simultaneously, or subsequently to dosing with two checkpoint inhibitors, immune stimulatory antibodies (inhibitory or agonistic) or other agonists known in the art or described herein.

[1215] Non-limiting examples of immune checkpoint inhibitors include CTLA-4 antibodies (including but not limited to Ipilimumab and Tremelimumab (CP675206)), anti-4-1BB (CD137, TNFRSF9) antibodies (including but not limited to PF-05082566, and Urelumab), anti CD134 (OX40) antibodies, including but not limited to Anti-OX40 antibody (Providence Health and Services), anti-PD-1 antibodies (including but not limited to Nivolumab, Pidilizumab, Pembrolizumab (MK-3475/SCH900475, lambrolizumab, REGN2810, PD-1 (Agenus)), anti-PD-L1 antibodies (including but not limited to durvalumab (MEDI4736), avelumab (MSB0010718C), and atezolizumab (MPDL3280A, RG7446, R05541267)), and anti-KIR antibodies (including but not limited to Lirilumab), LAG3 antibodies (including but not limited to BMS-986016), anti-CCR4 antibodies (including but not limited to Mogamulizumab), anti-CD27 antibodies (including but not limited to Varlilumab), anti-CXCR4 antibodies (including but not limited to Ulocuplumab). In some embodiments, the at least one bacterial cell is administered sequentially, simultaneously, or subsequently to dosing with an anti-phosphatidyl serine antibody (including but not limited to Bavituxumab).

[1216] In some embodiments, the at least one bacterial cell is administered sequentially, simultaneously, or subsequently to dosing with one or more antibodies selected from TLR9 antibody (including, but not limited to, MGN1703 PD-1 antibody (including, but not limited to, SHR-1210 (Incyte/Jiangsu Hengrui)), anti-OX40 antibody (including, but not limited to, OX40 (Agenus)), anti-Tim3 antibody (including, but not limited to, Anti-Tim3 (Agenus/INcyte)), anti-Lag3 antibody (including, but not limited to, Anti-Lag3 (Agenus/INcyte)), anti-B7H3 antibody (including, but not limited to, Enoblituzumab (MGA-271), anti-CT-011 (hBAT, hBAT1) as described in WO2009101611, anti-PDL-2 antibody (including, but not limited to, AMP-224 (described in WO2010027827 and WO2011066342)), anti-CD40 antibody (including, but not limited to, CP-870, 893), anti-CD40 antibody (including, but not limited to, CP-870, 893).

[1217] In some embodiments, one or more engineered bacteria described herein, which comprise gene sequence(s) encoding enzymes for the production or consumption of metabolite, e.g., kynurenine, consumers, adenosine consumers, arginine producers, ammonia consumers and/or STING agonist producers are administered sequentially, simultaneously, or subsequently to dosing with one or more checkpoint inhibitors. In some embodiments, the checkpoint inhibitor is administered systemically, and the bacteria are administered intratumorally. In some embodiments, the checkpoint inhibitor and bacteria are administered systemically. In some embodiments, one or more engineered bacteria described herein, which comprise gene sequence(s) encoding a metabolic converter, e.g., kynurenine consumers, adenosine consumers, arginine producers and/or ammonia consumers, and/or STING agonist producers, are administered sequentially, simultaneously, or subsequently to dosing with an anti-PD1 antibody. In some embodiments, one or more engineered bacteria described herein, which comprise gene sequence(s) encoding a metabolic converter, e.g., kynurenine, consumers, adenosine consumers, arginine producers, ammonia consumers and/or STING agonist producers, are administered sequentially, simultaneously, or subsequently to dosing with an anti-CTLA-4 antibody. In some embodiments, genetically engineered bacteria expressing any one or more of the described circuits for the degradation of adenosine are administered sequentially, simultaneously, or subsequently to dosing with an anti-PD-L1 antibody.

[1218] In some embodiments, genetically engineered bacteria comprising gene sequence(s) encoding a metabolic converter, e.g., kynurenine, consumers, adenosine consumers, arginine producers, ammonia consumers and/or STING agonist producers, are administered sequentially, simultaneously, or subsequently to dosing with an anti-CTLA4 antibody and an anti-PD-1 antibody. In some embodiments, genetically engineered bacteria expressing any one or more of the described circuits for the degradation of adenosine are administered sequentially, simultaneously, or subsequently to dosing with an anti-PD-L1 antibody and a CTLA4 antibody.

[1219] In some embodiments, genetically engineered bacteria expressing any one or more of the described circuits for the degradation of adenosine are administered sequentially, simultaneously, or subsequently to dosing with a checkpoint inhibitor, e.g., as described herein and known in the art, including but not limited to anti-PD-1, anti-PD-L1, and anti-CTLA-4. In some embodiments, genetically engineered bacteria expressing any one or more of the described circuits for the degradation of adenosine are administered sequentially, simultaneously, or subsequently to dosing with anti-PD1 antibody. In some embodiments, genetically engineered bacteria expressing any one or more of the described circuits for the degradation of adenosine are administered sequentially, simultaneously, or subsequently to dosing with anti-PD-L1 antibody. In some embodiments, genetically engineered bacteria expressing any one or more of the described circuits for the degradation of adenosine are administered sequentially, simultaneously, or subsequently to dosing with anti-CTLA4 antibody. In some embodiments, genetically engineered bacteria of expressing any one or more of the described circuits for the degradation of adenosine are administered sequentially, simultaneously, or subsequently to dosing with an anti-CTLA4 antibody and anti-PD1 antibody and/or PD-L1 antibody.

[1220] In some embodiments, genetically engineered bacteria expressing any one or more of the described circuits for the consumption of kynurenine are administered sequentially, simultaneously, or subsequently to dosing with a checkpoint inhibitor, e.g., as described herein and known in the art, including but not limited to anti-PD-1, anti-PD-L1, and anti-CTLA-4. In some embodiments, genetically engineered bacteria expressing any one or more of the described circuits for the consumption of kynurenine are administered sequentially, simultaneously, or subsequently to dosing with an anti-CTLA4 antibody. In some embodiments, genetically engineered bacteria expressing any one or more of the described circuits for the consumption of kynurenine are administered sequentially, simultaneously, or subsequently to dosing with anti-PD1 antibody. In some embodiments, genetically engineered bacteria expressing any one or more of the described circuits for the consumption of kynurenine are administered sequentially, simultaneously, or subsequently to dosing with anti-PD-L1 antibody. In some embodiments, genetically engineered bacteria of expressing any one or more of the described circuits for the consumption of kynurenine are administered sequentially, simultaneously, or subsequently to dosing with an anti-CTLA4 antibody and anti-PD1 antibody and/or anti-PD-L1 antibody.

[1221] In some embodiments, genetically engineered bacteria expressing any one or more of the described circuits for the production of arginine and/or consumption of ammonia are administered sequentially, simultaneously, or subsequently to dosing with a checkpoint inhibitor, e.g., as described herein and known in the art, including but not limited to anti-PD-1, anti-PD-L1, and anti-CTLA-4. In some embodiments, genetically engineered bacteria expressing any one or more of the described circuits for the production of arginine and/or consumption of ammonia are administered sequentially, simultaneously, or subsequently to dosing with an anti-CTLA4 antibody. In some embodiments, genetically engineered bacteria expressing any one or more of the described circuits for the production of arginine and/or consumption of ammonia are administered sequentially, simultaneously, or subsequently to dosing with anti-PD1 antibody. In some embodiments, genetically engineered bacteria expressing any one or more of the described circuits for the production of arginine and/or consumption of ammonia are administered sequentially, simultaneously, or subsequently to dosing with anti-PD-1L antibody. In some embodiments, genetically engineered bacteria of expressing any one or more of the described circuits for the production of arginine and/or consumption of ammonia are administered sequentially, simultaneously, or subsequently to dosing with an anti-CTLA4 antibody and anti-PD1 antibody.

[1222] In some embodiments, genetically engineered bacteria expressing any one or more of the described circuits for the production of one or more STING agonists are administered sequentially, simultaneously, or subsequently to dosing with a checkpoint inhibitor, e.g., as described herein and known in the art, including but not limited to anti-PD-1, anti-PD-L1, and anti-CTLA-4. In some embodiments, genetically engineered bacteria expressing any one or more of the described circuits for the production of one or more STING agonists are administered sequentially, simultaneously, or subsequently to dosing with an anti-CTLA4 antibody. In some embodiments, genetically engineered bacteria expressing any one or more of the described circuits for the production of one or more STING agonists are administered sequentially, simultaneously, or subsequently to dosing with anti-PD1 antibody. In some embodiments, genetically engineered bacteria expressing any one or more of the described circuits for the production of one or more STING agonists are administered sequentially, simultaneously, or subsequently to dosing with anti-PD-L1 antibody. In some embodiments, genetically engineered bacteria of expressing any one or more of the described circuits for the production of one or more STING agonists are administered sequentially, simultaneously, or subsequently to dosing with an anti-CTLA4 antibody and anti-PD1 antibody and/or anti-PD-L1 antibody.

[1223] In some embodiments, one or more genetically engineered bacteria expressing any one or more of the described circuits for the production of one or more STING agonists and one or more metabolic conversion circuits are administered sequentially, simultaneously, or subsequently to dosing with a checkpoint inhibitor, e.g., as described herein and known in the art, including but not limited to anti-PD-1, anti-PD-L1, and anti-CTLA-4. In some embodiments, one or more genetically engineered bacteria expressing any one or more of the described circuits for the production of one or more STING agonists and one or more metabolic conversion circuits are administered sequentially, simultaneously, or subsequently to dosing with an anti-CTLA-4 antibody. In some embodiments, one or more genetically engineered bacteria expressing any one or more of the described circuits for the production of one or more STING agonists and one or more metabolic conversion circuits are administered sequentially, simultaneously, or subsequently to dosing with anti-PD-1 antibody. In some embodiments, one or more genetically engineered bacteria expressing any one or more of the described circuits for the production of one or more STING agonists and one or more metabolic conversion circuits are administered sequentially, simultaneously, or subsequently to dosing with anti-PD-L1 antibody. In some embodiments, genetically engineered bacteria of expressing any one or more of the described circuits for the production of one or more STING agonists and one or more metabolic conversion circuits are administered sequentially, simultaneously, or subsequently to dosing with an anti-CTLA-4 antibody and anti-PD-1 antibody and/or anti-PD-L1 antibody. In any of these embodiments, the genetically engineered bacteria may further comprise mutation(s) or deletion(s) in one or more essential genes. In any of these embodiments, the bacteria may comprise one or more auxotrophic modifications, e.g., mutations or deletions in dapA. In any of these embodiments, the bacteria may comprise one or more auxotrophic modifications, e.g., mutations or deletions in thyA. In any of these embodiments, the bacteria may further comprise a phage modification, e.g., a mutation or deletion, in an endogenous prophage as described herein.

[1224] In some embodiments, one or more genetically engineered bacteria expressing any one or more of the described circuits for the production of one or more STING agonists and one or more kynureninase(s), e.g., from Pseudomonas fluorescens, are administered sequentially, simultaneously, or subsequently to dosing with a checkpoint inhibitor, e.g., as described herein and known in the art, including but not limited to anti-PD-1, anti-PD-L1, and anti-CTLA-4. In some embodiments, one or more genetically engineered bacteria expressing any one or more of the described circuits for the production of one or more STING agonists and one or more kynureninase(s), e.g., from Pseudomonas fluorescens, are administered sequentially, simultaneously, or subsequently to dosing with an anti-CTLA-4 antibody. In some embodiments, one or more genetically engineered bacteria expressing any one or more of the described circuits for the production of one or more STING agonists and one or more kynureninase(s), e.g., from Pseudomonas fluorescens, are administered sequentially, simultaneously, or subsequently to dosing with anti-PD-1 antibody. In some embodiments, one or more genetically engineered bacteria expressing any one or more of the described circuits for the production of one or more STING agonists and one or more kynureninase(s), e.g., from Pseudomonas fluorescens, are administered sequentially, simultaneously, or subsequently to dosing with anti-PD-L1 antibody.

[1225] In some embodiments, genetically engineered bacteria of expressing any one or more of the described circuits for the production of one or more STING agonists and one or more kynureninase(s), e.g., from Pseudomonas fluorescens, are administered sequentially, simultaneously, or subsequently to dosing with an anti-CTLA-4 antibody and anti-PD-1 antibody and/or anti-PD-L1 antibody. In some embodiments, the STING agonist is c-diAMP. In some embodiments, the STING agonist producing enzyme is DacA, e.g., from Listeria monocytogenes. In certain embodiments, dacA is operably linked to a promoter inducible under low oxygen conditions, e.g., a FNR promoter. In some embodiments, kynureninase is from Pseudomonas fluorescens and the bacterium comprising gene sequences encoding kynureninase further comprises a mutation or deletion in trpE. In some embodiments, kynureninase is operably linked to a constitutive promoter In any of these embodiments, the genetically engineered bacteria may further comprise mutation(s) or deletion(s) in one or more essential genes. In any of these embodiments, the bacteria may comprise one or more auxotrophic modifications, e.g., mutations or deletions, dapA. In any of these embodiments, the bacteria may comprise one or more auxotrophic modifications, e.g., mutations or deletions, trpE. In any of these embodiments, the bacteria may comprise one or more auxotrophic modifications, e.g., mutations or deletions, thyA. In any of these embodiments, the bacteria may further comprise a phage modification, e.g., a mutation or deletion, in an endogenous prophage as described herein.

[1226] In certain embodiments, one or more genetically engineered bacteria expressing any one or more of the described circuits for the production of one or more STING agonists and one or more kynureninase(s), e.g., from Pseudomonas fluorescens, are administered sequentially, simultaneously, or subsequently to dosing with a anti-PD-1, anti-PD-L1 or anti-CTLA-4. In one embodiment, one or more genetically engineered bacteria comprise gene sequence(s) encoding DacA, e.g., from Listeria monocytogenes, wherein DacA is operably linked to a promoter inducible under low oxygen conditions, e.g., a FNR promoter. The bacteria comprising gene sequences encoding dacA comprise a mutation or deletion in dapA. The one or more genetically engineered bacteria further comprise gene sequences encoding kynureninase from Pseudomonas fluorescens and the bacterium comprising gene sequences encoding kynureninase further comprises a mutation or deletion in trpE. In certain embodiments, dacA and kynureninase sequences are integrated into the bacterial chromosome. In one specific embodiment, the one or more genetically engineered bacteria may further comprise mutation(s) or deletion(s) in thyA. In one specific embodiment, the bacteria may further comprise a phage modification, e.g., a mutation or deletion, in an endogenous prophage as described herein.

[1227] In one specific embodiment, the checkpoint inhibitor is PD-1. In one specific embodiment, the checkpoint inhibitor is PD-L1. In one specific embodiment, the checkpoint inhibitor is CTLA-4.

[1228] In one embodiment, dacA circuitry (e.g., from Listeria monocytogenes, e.g., under control of a low oxygen promoter and chromosomally integrated), kynureninase circuitry (e.g., from Pseudomonas fluorescens, e.g., under the control of a constitutive promoter and chromosomally integrated) and auxotrophic mutations (mutations or deletions in trpE, dapA, and thyA) are combined in one bacterium. In an alternate embodiment, a bacterial composition comprises a first bacterium comprising gene sequences encoding dacA (e.g., from Listeria monocytogenes, e.g., under control of a low oxygen promoter and chromosomally integrated), further comprising a mutation or deletion in dapA, and with an optional mutations or deletions in thyA and a second bacterium comprising gene sequences encoding kynureninase circuitry (e.g., from Pseudomonas fluorescens, e.g., under the control of a constitutive promoter and chromosomally integrated), a mutation or deletion in trpE, and optionally a mutation or deletion in thyA. In any of these embodiments, the bacteria may further comprise a phage modification, e.g., a mutation or deletion, in an endogenous prophage as described herein.

[1229] In some embodiments, one or more genetically engineered bacteria expressing any one or more of the described circuits for the production of one or more STING agonists and one or more adenosine consuming enzymes described herein are administered sequentially, simultaneously, or subsequently to dosing with a checkpoint inhibitor, e.g., as described herein and known in the art, including but not limited to anti-PD-1, anti-PD-L1, and anti-CTLA-4. In some embodiments, one or more genetically engineered bacteria expressing any one or more of the described circuits for the production of one or more STING agonists and one or more adenosine consuming enzymes described herein are administered sequentially, simultaneously, or subsequently to dosing with an anti-CTLA-4 antibody. In some embodiments, one or more genetically engineered bacteria expressing any one or more of the described circuits for the production of one or more STING agonists and one or more adenosine consuming enzymes described herein are administered sequentially, simultaneously, or subsequently to dosing with anti-PD-1 antibody. In some embodiments, one or more genetically engineered bacteria expressing any one or more of the described circuits for the production of one or more STING agonists and one or more adenosine consuming enzymes described herein are administered sequentially, simultaneously, or subsequently to dosing with anti-PD-L1 antibody. In some embodiments, genetically engineered bacteria of expressing any one or more of the described circuits for the production of one or more STING agonists and one or more adenosine consuming enzymes described herein are administered sequentially, simultaneously, or subsequently to dosing with an anti-CTLA-4 antibody and anti-PD-1 antibody and/or anti-PD-L1 antibody. In any of these embodiments, the genetically engineered bacteria may further comprise mutation(s) or deletion(s) in one or more essential genes. In any of these embodiments, the bacteria may comprise one or more auxotrophic modifications, e.g., mutations or deletions, dapA. In any of these embodiments, the bacteria may comprise one or more auxotrophic modifications, e.g., mutations or deletions, trpE. In any of these embodiments, the bacteria may comprise one or more auxotrophic modifications, e.g., mutations or deletions, thyA. In any of these embodiments, the bacteria may further comprise a phage modification, e.g., a mutation or deletion, in an endogenous prophage as described herein.

[1230] In some embodiments, one or more genetically engineered bacteria comprising any one or more of the described circuits for the production of one or more STING agonists and one or more arginine production and/or ammonia consuming circuits described herein are administered sequentially, simultaneously, or subsequently to dosing with a checkpoint inhibitor, e.g., as described herein and known in the art, including but not limited to anti-PD-1, anti-PD-L1, and anti-CTLA-4. In some embodiments, genetically engineered bacteria comprising any one or more of the described circuits for the production of one or more STING agonists and one or more arginine production and/or ammonia consuming circuits described herein are administered sequentially, simultaneously, or subsequently to dosing with an anti-CTLA-4 antibody. In some embodiments, genetically engineered bacteria comprising any one or more of the described circuits for the production of one or more STING agonists and one or more arginine production and/or ammonia consuming circuits described herein are administered sequentially, simultaneously, or subsequently to dosing with anti-PD-1 antibody. In some embodiments, genetically engineered bacteria comprising any one or more of the described circuits for the production of one or more STING agonists and one or more arginine production and/or ammonia consuming circuits described herein are administered sequentially, simultaneously, or subsequently to dosing with anti-PD-L1 antibody. In some embodiments, genetically engineered bacteria of comprising any one or more of the described circuits for the production of one or more STING agonists and one or more arginine production and/or ammonia consuming circuits described herein are administered sequentially, simultaneously, or subsequently to dosing with an anti-CTLA-4 antibody and anti-PD-1 antibody and/or anti-PD-L1 antibody. In any of these embodiments, the genetically engineered bacteria may further comprise mutation(s) or deletion(s) in one or more essential genes. In any of these embodiments, the bacteria may comprise one or more auxotrophic modifications, e.g., mutations or deletions, dapA. In any of these embodiments, the bacteria may comprise one or more auxotrophic modifications, e.g., mutations or deletions, trpE. In any of these embodiments, the bacteria may comprise one or more auxotrophic modifications, e.g., mutations or deletions, thyA. In any of these embodiments, the bacteria may further comprise a phage modification, e.g., a mutation or deletion, in an endogenous prophage as described herein.

[1231] In some embodiments, genetically engineered bacteria of expressing any one or more of the described circuits for the production of one or more STING agonists and one or more arginine producing/ammonia consuming circuits, are administered sequentially, simultaneously, or subsequently to dosing with an anti-CTLA-4 antibody and anti-PD-1 antibody and/or anti-PD-L1 antibody. In some embodiments, the STING agonist is c-diAMP. In some embodiments, the STING agonist producing enzyme is DacA, e.g., from Listeria monocytogenes. In certain embodiments, dacA is operably linked to a promoter inducible under low oxygen conditions, e.g., a FNR promoter. In some embodiments, the arginine producing/ammonia consuming circuit comprises feedback-resistant ArgA and the bacterium comprising gene sequences encoding feedback-resistant ArgA further has a mutation or deletion in ArgR In some embodiments, feedback-resistant ArgA is operably linked to a promoter inducible under low oxygen conditions. In any of these embodiments, the genetically engineered bacteria may further comprise mutation(s) or deletion(s) in one or more essential genes. In any of these embodiments, the bacteria may comprise one or more auxotrophic modifications, e.g., mutations or deletions, dapA. In any of these embodiments, the bacteria may comprise one or more auxotrophic modifications, e.g., mutations or deletions, thyA.

[1232] In certain embodiments, one or more genetically engineered bacteria expressing any one or more of the described circuits for the production of one or more STING agonists and one or more kynureninase(s), e.g., from Pseudomonas fluorescens, are administered sequentially, simultaneously, or subsequently to dosing with a anti-PD-1, anti-PD-L1 or anti-CTLA-4. In one embodiment, one or more genetically engineered bacteria comprise gene sequence(s) encoding DacA, e.g., from Listeria monocytogenes, wherein DacA is operably linked to a promoter inducible under low oxygen conditions, e.g., a FNR promoter. The bacteria comprising gene sequences encoding dacA comprise a mutation or deletion in dapA. The one or more genetically engineered bacteria further comprise gene sequences encoding feedback-resistant ArgA and the bacterium comprising gene sequences encoding feedback-resistant ArgA further comprises a mutation or deletion in ArgR. In certain embodiments, dacA and feedback-resistant ArgA sequences are integrated into the bacterial chromosome. In one specific embodiment, the one or more genetically engineered bacteria may further comprise mutation(s) or deletion(s) in thyA. In one specific embodiment, the checkpoint inhibitor is PD-1. In one specific embodiment, the checkpoint inhibitor is PD-L1. In one specific embodiment, the checkpoint inhibitor is CTLA-4.

[1233] In one embodiment, dacA circuitry (e.g., from Listeria monocytogenes, e.g., under control of a low oxygen promoter and chromosomally integrated), arginine production/ammonia consumption circuitry (e.g., comprising ArgAfbr, e.g., under the control of a low oxygen inducible promoter and chromosomally integrated and ΔArgR) and auxotrophic mutations (mutations or deletions in dapA, and thyA) are combined in one bacterium. In an alternate embodiment, a bacterial composition comprises a first bacterium comprising gene sequences encoding dacA (e.g., from Listeria monocytogenes, e.g., under control of a low oxygen promoter and chromosomally integrated), further comprising a mutation or deletion in dapA, and with an optional mutation or deletion in thyA, and a second bacterium comprising gene sequences encoding arginine production/ammonia consumption circuitry (e.g., comprising ArgAfbr, e.g., under the control of a low oxygen inducible promoter and chromosomally integrated and ΔArgR), and optionally a mutation or deletion in thyA.

[1234] In some embodiments, one or more genetically engineered bacteria, e.g., adenosine consumer, kynurenine consumer, ammonia consumer, arginine producer, and/or STING agonist producer are able to improve anti-tumor activity (e.g., tumor proliferation, size, volume, weight) of the co-administered checkpoint inhibitors (e.g., anti-PD-1, anti-PD-L1 and/or anti-CTLA-4), e.g., by 10% to 20%, 20% to 25%, 25% to 30%, 30% to 40%, 40% to 50%, 50% to 60%, 60% to 70%, 70% to 75%, 75% to 80%, 80% to 85%, 85% to 90%, 90% to 95%, 95% to 99%, or more as compared to a checkpoint inhibitor therapy alone under the same conditions or as compared to an unmodified bacteria of the same subtype under the same conditions. In some embodiments, one or more genetically engineered bacteria, e.g., adenosine consumer, kynurenine consumer, ammonia consumer, arginine producer, and/or STING agonist producer, are able to improve anti-tumor activity (e.g., tumor proliferation, size, volume, weight) of the co-administered checkpoint inhibitors (e.g., anti-PD-1, anti-PD-L1 and/or anti-CTLA-4), e.g., 1.0-1.2-fold, 1.2-1.4-fold, 1.4-1.6-fold, 1.6-1.8-fold, 1.8-2-fold, or two-fold more or more as compared to a chemotherapy alone under the same conditions or as compared to an unmodified bacteria of the same subtype under the same conditions. In some embodiments, one or more genetically engineered bacteria, e.g., adenosine consumer, kynurenine consumer, ammonia consumer, arginine producer, and/or STING agonist producer, are able to improve anti-tumor activity (e.g., tumor proliferation, size, volume, weight) of the co-administered checkpoint inhibitor(e.g., anti-PD-1, anti-PD-L1 and/or anti-CTLA-4), e.g., about three-fold, four-fold, about three-fold, four-fold, five-fold, six-fold, seven-fold, eight-fold, nine-fold, ten-fold, fifteen-fold, twenty-fold, thirty-fold, forty-fold, fifty-fold, hundred-fold, five hundred-fold, or one-thousand-fold more or more as compared to a chemotherapy alone under the same conditions or as compared to an unmodified bacteria of the same subtype under the same conditions.

[1235] In some embodiments, the bacteria genetically engineered to consume adenosine are able to improve anti-tumor activity (e.g., tumor proliferation, size, volume, weight) of the co-administered checkpoint inhibitors(e.g., PD-1 and/or CTLA-4), e.g., by 10% to 20%, 20% to 25%, 25% to 30%, 30% to 40%, 40% to 50%, 50% to 60%, 60% to 70%, 70% to 75%, 75% to 80%, 80% to 85%, 85% to 90%, 90% to 95%, 95% to 99%, or more as compared to a checkpoint inhibitor therapy alone under the same conditions or as compared to an unmodified bacteria of the same subtype under the same conditions. In some embodiments, the bacteria genetically engineered to consume adenosine are able to improve anti-tumor activity (e.g., tumor proliferation, size, volume, weight) of the co-administered checkpoint inhibitors (e.g., anti-PD-1, anti-PD-L1 and/or anti-CTLA-4), e.g., 1.0-1.2-fold, 1.2-1.4-fold, 1.4-1.6-fold, 1.6-1.8-fold, 1.8-2-fold, or two-fold more or more as compared to a chemotherapy alone under the same conditions or as compared to an unmodified bacteria of the same subtype under the same conditions. In some embodiments, the bacteria genetically engineered to consume adenosine are able to improve anti-tumor activity (e.g., tumor proliferation, size, volume, weight) of the co-administered checkpoint inhibitor(e.g., anti-PD-1, anti-PD-L1 and/or anti-CTLA-4), e.g., about three-fold, four-fold, about three-fold, four-fold, five-fold, six-fold, seven-fold, eight-fold, nine-fold, ten-fold, fifteen-fold, twenty-fold, thirty-fold, forty-fold, fifty-fold, hundred-fold, five hundred-fold, or one-thousand-fold more or more as compared to a chemotherapy alone under the same conditions or as compared to an unmodified bacteria of the same subtype under the same conditions.

[1236] In some embodiments, the bacteria genetically engineered to consume kynurenine are able to improve anti-tumor activity (e.g., tumor proliferation, size, volume, weight) of the co-administered checkpoint inhibitors (e.g., anti-PD-1, anti-PD-L1 and/or anti-CTLA-4), e.g., by 10% to 20%, 20% to 25%, 25% to 30%, 30% to 40%, 40% to 50%, 50% to 60%, 60% to 70%, 70% to 75%, 75% to 80%, 80% to 85%, 85% to 90%, 90% to 95%, 95% to 99%, or more as compared to a checkpoint inhibitor therapy alone under the same conditions or as compared to an unmodified bacteria of the same subtype under the same conditions. In some embodiments, the bacteria genetically engineered to consume kynurenine are able to improve anti-tumor activity (e.g., tumor proliferation, size, volume, weight) of the co-administered checkpoint inhibitors (e.g., PD-1, PD-L1 and/or CTLA-4), e.g., 1.0-1.2-fold, 1.2-1.4-fold, 1.4-1.6-fold, 1.6-1.8-fold, 1.8-2-fold, or two-fold more or more as compared to a chemotherapy alone under the same conditions or as compared to an unmodified bacteria of the same subtype under the same conditions. In some embodiments, the bacteria genetically engineered to consume kynurenine are able to improve anti-tumor activity (e.g., tumor proliferation, size, volume, weight) of the co-administered checkpoint inhibitor(e.g., PD-1, PD-L1 and/or CTLA-4), e.g., about three-fold, four-fold, about three-fold, four-fold, five-fold, six-fold, seven-fold, eight-fold, nine-fold, ten-fold, fifteen-fold, twenty-fold, thirty-fold, forty-fold, fifty-fold, hundred-fold, five hundred-fold, or one-thousand-fold more or more as compared to a chemotherapy alone under the same conditions or as compared to an unmodified bacteria of the same subtype under the same conditions.

[1237] In some embodiments, the bacteria genetically engineered to produce arginine and/or consume ammonia are able to improve anti-tumor activity (e.g., tumor proliferation, size, volume, weight) of the co-administered checkpoint inhibitors(e.g., PD-1, PD-L1 and/or CTLA-4), e.g., by 10% to 20%, 20% to 25%, 25% to 30%, 30% to 40%, 40% to 50%, 50% to 60%, 60% to 70%, 70% to 75%, 75% to 80%, 80% to 85%, 85% to 90%, 90% to 95%, 95% to 99%, or more as compared to a checkpoint inhibitor therapy alone under the same conditions or as compared to an unmodified bacteria of the same subtype under the same conditions. In some embodiments, the bacteria genetically engineered to produce arginine and/or consume ammonia are able to improve anti-tumor activity (e.g., tumor proliferation, size, volume, weight) of the co-administered checkpoint inhibitors (e.g., PD-1, PD-L1 and/or CTLA-4), e.g., 1.0-1.2-fold, 1.2-1.4-fold, 1.4-1.6-fold, 1.6-1.8-fold, 1.8-2-fold, or two-fold more or more as compared to a chemotherapy alone under the same conditions or as compared to an unmodified bacteria of the same subtype under the same conditions. In some embodiments, the bacteria genetically engineered to produce arginine and/or consume ammonia are able to improve anti-tumor activity (e.g., tumor proliferation, size, volume, weight) of the co-administered checkpoint inhibitor (e.g., PD-1, PD-L1 and/or CTLA-4), e.g., about three-fold, four-fold, about three-fold, four-fold, five-fold, six-fold, seven-fold, eight-fold, nine-fold, ten-fold, fifteen-fold, twenty-fold, thirty-fold, forty-fold, fifty-fold, hundred-fold, five hundred-fold, or one-thousand-fold more or more as compared to a chemotherapy alone under the same conditions or as compared to an unmodified bacteria of the same subtype under the same conditions.

[1238] In some embodiments, the bacteria genetically engineered to produce STING agonist(s) are able to improve anti-tumor activity (e.g., tumor proliferation, size, volume, weight) of the co-administered checkpoint inhibitors(e.g., anti-PD-1, anti-PD-L1 and/or anti-CTLA-4), e.g., by 10% to 20%, 20% to 25%, 25% to 30%, 30% to 40%, 40% to 50%, 50% to 60%, 60% to 70%, 70% to 75%, 75% to 80%, 80% to 85%, 85% to 90%, 90% to 95%, 95% to 99%, or more as compared to a checkpoint inhibitor therapy alone under the same conditions or as compared to an unmodified bacteria of the same subtype under the same conditions. In some embodiments, the bacteria genetically engineered to produce STING agonist(s) are able to improve anti-tumor activity (e.g., tumor proliferation, size, volume, weight) of the co-administered checkpoint inhibitors (e.g., PD-1, PD-L1 and/or CTLA-4), e.g., 1.0-1.2-fold, 1.2-1.4-fold, 1.4-1.6-fold, 1.6-1.8-fold, 1.8-2-fold, or two-fold more or more as compared to a chemotherapy alone under the same conditions or as compared to an unmodified bacteria of the same subtype under the same conditions. In some embodiments, the bacteria genetically engineered to produce STING agonist(s) are able to improve anti-tumor activity (e.g., tumor proliferation, size, volume, weight) of the co-administered checkpoint inhibitor(e.g., PD-1, PD-L1 and/or CTLA-4), e.g., about three-fold, four-fold, about three-fold, four-fold, five-fold, six-fold, seven-fold, eight-fold, nine-fold, ten-fold, fifteen-fold, twenty-fold, thirty-fold, forty-fold, fifty-fold, hundred-fold, five hundred-fold, or one-thousand-fold more or more as compared to a chemotherapy alone under the same conditions or as compared to an unmodified bacteria of the same subtype under the same conditions.

### Co-Stimulatory Molecules

[1239] In certain embodiments, one or more genetically engineered bacteria are administered sequentially, simultaneously, or subsequently to dosing with one or more agonistic immune stimulatory molecules or agonists, including but not limited to, agonistic antibodies.

[1240] In some embodiments, the at least one bacterial cell is administered sequentially, simultaneously, or subsequently to dosing with one or more antibodies selected from anti-OX40 antibody (including, but not limited to, INCAGN01949 (Agenus); BMS 986178 (Bristol-Myers Squibb), MEDI0562 (Medimmune), GSK3174998 (GSK), PF-04518600 (Pfizer)), anti-41BB/CD137 (including but not limited to PF-05082566 (Pfizer), urelumab (BMS-663513; Bristol-Myers Squibb), and anti-GITR (including but not limited to TRX518 (Leap Therapeutics), MK-4166 (Merck), MK-1248 (Merck), AMG 228 (Amgen), BMS-986156 (BMS), INCAGN01876 (Incyte/Agenus), MEDI1873 (AZ), GWN323 (NVS). In some embodiments, one or more engineered bacteria described herein, which comprise gene sequence(s) encoding enzymes for the production or consumption of metabolite, e.g., kynurenine, consumers, adenosine consumers, arginine producers, ammonia consumers and/or STING agonist producers are administered sequentially, simultaneously, or subsequently to dosing with agonistic antibodies selected from anti-OX40 antibody, anti-41BB, and/or anti-GITR. In some embodiments, the agonistic antibody, e.g., anti-OX40 antibody, anti-41BB, and/or anti-GITR, is administered systemically, and the bacteria are administered intratumorally. In some embodiments, the agonistic antibody, e.g., anti-OX40 antibody, anti-41BB, and/or anti-GITR, and bacteria are administered systemically. In some embodiments, one or more engineered bacteria described herein, which comprise gene sequence(s) encoding a metabolic converter, e.g., kynurenine consumers, adenosine consumers, arginine producers and/or ammonia consumers, and/or STING agonist producers, are administered sequentially, simultaneously, or subsequently to dosing with an anti-OX40 antibody. In some embodiments, one or more engineered bacteria described herein, which comprise gene sequence(s) encoding a metabolic converter, e.g., kynurenine consumers, adenosine consumers, arginine producers, ammonia consumers and/or STING agonist producers, are administered sequentially, simultaneously, or subsequently to dosing with an anti-41BB antibody. In some embodiments, genetically engineered bacteria expressing any one or more of the described circuits for the degradation of adenosine are administered sequentially, simultaneously, or subsequently to dosing with an anti-GITR antibody.

[1241] In some embodiments, genetically engineered bacteria expressing any one or more of the described circuits for the degradation of adenosine are administered sequentially, simultaneously, or subsequently to dosing with an agonistic immune stimulatory molecule, e.g., an agonistic antibody, e.g., anti-OX40 antibody, anti-41BB antibody, and/or anti-GITR antibody. In some embodiments, genetically engineered bacteria expressing any one or more of the described circuits for the degradation of adenosine are administered sequentially, simultaneously, or subsequently to dosing with anti-Ox40 antibody. In some embodiments, genetically engineered bacteria expressing any one or more of the described circuits for the degradation of adenosine are administered sequentially, simultaneously, or subsequently to dosing with anti-41BB antibody. In some embodiments, genetically engineered bacteria expressing any one or more of the described circuits for the degradation of adenosine are administered sequentially, simultaneously, or subsequently to dosing with anti-GITR antibody. In some embodiments, genetically engineered bacteria of expressing any one or more of the described circuits for the degradation of adenosine are administered sequentially, simultaneously, or subsequently to dosing with an anti-GITR antibody and anti-OX40 antibody and/or anti-41BB antibody.

[1242] In some embodiments, genetically engineered bacteria expressing any one or more of the described circuits for the consumption of kynurenine are administered sequentially, simultaneously, or subsequently to dosing with an agonistic immune stimulatory molecule, e.g., an agonistic antibody, e.g., anti-OX40 antibody, anti-41BB antibody, and/or anti-GITR antibody. In some embodiments, genetically engineered bacteria expressing any one or more of the described circuits for the consumption of kynurenine are administered sequentially, simultaneously, or subsequently to dosing with an anti-GITR antibody. In some embodiments, genetically engineered bacteria expressing any one or more of the described circuits for the consumption of kynurenine are administered sequentially, simultaneously, or subsequently to dosing with anti-OX40 antibody. In some embodiments, genetically engineered bacteria expressing any one or more of the described circuits for the consumption of kynurenine are administered sequentially, simultaneously, or subsequently to dosing with anti-41BB antibody. In some embodiments, genetically engineered bacteria of expressing any one or more of the described circuits for the consumption of kynurenine are administered sequentially, simultaneously, or subsequently to dosing with an anti-GITR antibody and anti-OX40 antibody and/or anti-41BB antibody.

[1243] In some embodiments, genetically engineered bacteria expressing any one or more of the described circuits for the production of arginine and/or consumption of ammonia are administered sequentially, simultaneously, or subsequently to dosing with an agonistic immune stimulatory molecule, e.g., an agonistic antibody, e.g., anti-OX40 antibody, anti-41BB antibody, and/or anti-GITR antibody. In some embodiments, genetically engineered bacteria expressing any one or more of the described circuits for the production of arginine and/or consumption of ammonia are administered sequentially, simultaneously, or subsequently to dosing with an anti-GITR antibody. In some embodiments, genetically engineered bacteria expressing any one or more of the described circuits for the production of arginine and/or consumption of ammonia are administered sequentially, simultaneously, or subsequently to dosing with anti-OX40 antibody. In some embodiments, genetically engineered bacteria expressing any one or more of the described circuits for the production of arginine and/or consumption of ammonia are administered sequentially, simultaneously, or subsequently to dosing with anti-OX40L antibody. In some embodiments, genetically engineered bacteria of expressing any one or more of the described circuits for the production of arginine and/or consumption of ammonia are administered sequentially, simultaneously, or subsequently to dosing with an anti-GITR antibody and anti-OX40 antibody.

[1244] In some embodiments, genetically engineered bacteria expressing any one or more of the described circuits for the production of one or more STING agonists are administered sequentially, simultaneously, or subsequently to dosing with an agonistic immune stimulatory molecule, e.g., an agonistic antibody, e.g., anti-OX40 antibody, anti-41BB antibody, and/or anti-GITR antibody. In some embodiments, genetically engineered bacteria expressing any one or more of the described circuits for the production of one or more STING agonists are administered sequentially, simultaneously, or subsequently to dosing with an anti-GITR antibody. In some embodiments, genetically engineered bacteria expressing any one or more of the described circuits for the production of one or more STING agonists are administered sequentially, simultaneously, or subsequently to dosing with anti-OX40 antibody. In some embodiments, genetically engineered bacteria expressing any one or more of the described circuits for the production of one or more STING agonists are administered sequentially, simultaneously, or subsequently to dosing with anti-41BB antibody. In some embodiments, genetically engineered bacteria of expressing any one or more of the described circuits for the production of one or more STING agonists are administered sequentially, simultaneously, or subsequently to dosing with an anti-GITR antibody and anti-OX40 antibody and/or anti-41BB antibody. In any of these embodiments, the genetically engineered bacteria may further comprise mutation(s) or deletion(s) in one or more essential genes. In any of these embodiments, the bacteria may comprise one or more auxotrophic modifications, e.g., mutations or deletions, dapA. In any of these embodiments, the bacteria may comprise one or more auxotrophic modifications, e.g., mutations or deletions, thyA. In any of these embodiments, the bacteria may further comprise a phage modification, e.g., a mutation or deletion, in an endogenous prophage as described herein.

[1245] In some embodiments, one or more genetically engineered bacteria expressing any one or more of the described circuits for the production of one or more STING agonists and one or more metabolic conversion circuits are administered sequentially, simultaneously, or subsequently to dosing with a agonistic antibody or other immune stimulatory agonist, e.g., as described herein and known in the art, including but not limited to anti-OX40, anti-41BB, and anti-GITR. In some embodiments, one or more genetically engineered bacteria expressing any one or more of the described circuits for the production of one or more STING agonists and one or more metabolic conversion circuits are administered sequentially, simultaneously, or subsequently to dosing with an anti-GITR antibody. In some embodiments, one or more genetically engineered bacteria expressing any one or more of the described circuits for the production of one or more STING agonists and one or more metabolic conversion circuits are administered sequentially, simultaneously, or subsequently to dosing with anti-OX40 antibody. In some embodiments, one or more genetically engineered bacteria expressing any one or more of the described circuits for the production of one or more STING agonists and one or more metabolic conversion circuits are administered sequentially, simultaneously, or subsequently to dosing with anti-41BB antibody. In some embodiments, genetically engineered bacteria of expressing any one or more of the described circuits for the production of one or more STING agonists and one or more metabolic conversion circuits are administered sequentially, simultaneously, or subsequently to dosing with an anti-GITR antibody and anti-OX40 antibody and/or anti-41BB antibody. In any of these embodiments, the genetically engineered bacteria may further comprise mutation(s) or deletion(s) in one or more essential genes. In any of these embodiments, the bacteria may comprise one or more auxotrophic modifications, e.g., mutations or deletions, dapA. In any of these embodiments, the bacteria may comprise one or more auxotrophic modifications, e.g., mutations or deletions, thyA. In any of these embodiments, the bacteria may further comprise a phage modification, e.g., a mutation or deletion, in an endogenous prophage as described herein.

[1246] In some embodiments, one or more genetically engineered bacteria expressing any one or more of the described circuits for the production of one or more STING agonists and one or more kynureninase(s), e.g., from Pseudomonas fluorescens, are administered sequentially, simultaneously, or subsequently to dosing with a agonistic antibody or other immune stimulatory agonist, e.g., as described herein and known in the art, including but not limited to anti-OX40, anti-41BB, and anti-GITR. In some embodiments, one or more genetically engineered bacteria expressing any one or more of the described circuits for the production of one or more STING agonists and one or more kynureninase(s), e.g., from Pseudomonas fluorescens, are administered sequentially, simultaneously, or subsequently to dosing with an anti-GITR antibody. In some embodiments, one or more genetically engineered bacteria expressing any one or more of the described circuits for the production of one or more STING agonists and one or more kynureninase(s), e.g., from Pseudomonas fluorescens, are administered sequentially, simultaneously, or subsequently to dosing with anti-OX40 antibody. In some embodiments, one or more genetically engineered bacteria expressing any one or more of the described circuits for the production of one or more STING agonists and one or more kynureninase(s), e.g., from Pseudomonas fluorescens, are administered sequentially, simultaneously, or subsequently to dosing with anti-41BB antibody. In some embodiments, genetically engineered bacteria of expressing any one or more of the described circuits for the production of one or more STING agonists and one or more kynureninase(s), e.g., from Pseudomonas fluorescens, are administered sequentially, simultaneously, or subsequently to dosing with an anti-GITR antibody and anti-OX40 antibody and/or anti-41BB antibody. In any of these embodiments, the genetically engineered bacteria may further comprise mutation(s) or deletion(s) in one or more essential genes. In any of these embodiments, the bacteria may comprise one or more auxotrophic modifications, e.g., mutations or deletions, dapA. In any of these embodiments, the bacteria may comprise one or more auxotrophic modifications, e.g., mutations or deletions, trpE. In any of these embodiments, the bacteria may comprise one or more auxotrophic modifications, e.g., mutations or deletions, thyA. In any of these embodiments, the bacteria may further comprise a phage modification, e.g., a mutation or deletion, in an endogenous prophage as described herein.

[1247] In some embodiments, one or more genetically engineered bacteria expressing any one or more of the described circuits for the production of one or more STING agonists and one or more adenosine consuming enzymes described herein are administered sequentially, simultaneously, or subsequently to dosing with a agonistic antibody or other immune stimulatory agonist, e.g., as described herein and known in the art, including but not limited to anti-OX40, anti-41BB, and anti-GITR. In some embodiments, one or more genetically engineered bacteria expressing any one or more of the described circuits for the production of one or more STING agonists and one or more adenosine consuming enzymes described herein are administered sequentially, simultaneously, or subsequently to dosing with an anti-GITR antibody. In some embodiments, one or more genetically engineered bacteria expressing any one or more of the described circuits for the production of one or more STING agonists and one or more adenosine consuming enzymes described herein are administered sequentially, simultaneously, or subsequently to dosing with anti-OX40 antibody. In some embodiments, one or more genetically engineered bacteria expressing any one or more of the described circuits for the production of one or more STING agonists and one or more adenosine consuming enzymes described herein are administered sequentially, simultaneously, or subsequently to dosing with anti-41BB antibody. In some embodiments, genetically engineered bacteria of expressing any one or more of the described circuits for the production of one or more STING agonists and one or more adenosine consuming enzymes described herein are administered sequentially, simultaneously, or subsequently to dosing with an anti-GITR antibody and anti-OX40 antibody and/or anti-41BB antibody. In any of these embodiments, the genetically engineered bacteria may further comprise mutation(s) or deletion(s) in one or more essential genes. In any of these embodiments, the bacteria may comprise one or more auxotrophic modifications, e.g., mutations or deletions, dapA. In any of these embodiments, the bacteria may comprise one or more auxotrophic modifications, e.g., mutations or deletions, trpE. In any of these embodiments, the bacteria may comprise one or more auxotrophic modifications, e.g., mutations or deletions, thyA. In any of these embodiments, the bacteria may further comprise a phage modification, e.g., a mutation or deletion, in an endogenous prophage as described herein.

[1248] In some embodiments, one or more genetically engineered bacteria comprising any one or more of the described circuits for the production of one or more STING agonists and one or more arginine production and/or ammonia consuming circuits described herein are administered sequentially, simultaneously, or subsequently to dosing with a agonistic antibody or other immune stimulatory agonist, e.g., as described herein and known in the art, including but not limited to anti-OX40, anti-41BB, and anti-GITR. In some embodiments, genetically engineered bacteria comprising any one or more of the described circuits for the production of one or more STING agonists and one or more arginine production and/or ammonia consuming circuits described herein are administered sequentially, simultaneously, or subsequently to dosing with an anti-GITR antibody. In some embodiments, genetically engineered bacteria comprising any one or more of the described circuits for the production of one or more STING agonists and one or more arginine production and/or ammonia consuming circuits described herein are administered sequentially, simultaneously, or subsequently to dosing with anti-OX40 antibody. In some embodiments, genetically engineered bacteria comprising any one or more of the described circuits for the production of one or more STING agonists and one or more arginine production and/or ammonia consuming circuits described herein are administered sequentially, simultaneously, or subsequently to dosing with anti-41BB antibody. In some embodiments, genetically engineered bacteria of comprising any one or more of the described circuits for the production of one or more STING agonists and one or more arginine production and/or ammonia consuming circuits described herein are administered sequentially, simultaneously, or subsequently to dosing with an anti-GITR antibody and anti-OX40 antibody and/or anti-41BB antibody. In any of these embodiments, the genetically engineered bacteria may further comprise mutation(s) or deletion(s) in one or more essential genes. In any of these embodiments, the bacteria may comprise one or more auxotrophic modifications, e.g., mutations or deletions, dapA. In any of these embodiments, the bacteria may comprise one or more auxotrophic modifications, e.g., mutations or deletions, trpE. In any of these embodiments, the bacteria may comprise one or more auxotrophic modifications, e.g., mutations or deletions, thyA. In any of these embodiments, the bacteria may further comprise a phage modification, e.g., a mutation or deletion, in an endogenous prophage as described herein.

[1249] In some embodiments, one or more genetically engineered bacteria, e.g., adenosine consumer, kynurenine consumer, ammonia consumer, arginine producer, and/or STING agonist producer are able to improve anti-tumor activity (e.g., tumor proliferation, size, volume, weight) of the co-administered agonistic antibodies or other immune stimulatory agonist (e.g., anti-OX40, anti-41BB, and/or anti-GITR), e.g., by 10% to 20%, 20% to 25%, 25% to 30%, 30% to 40%, 40% to 50%, 50% to 60%, 60% to 70%, 70% to 75%, 75% to 80%, 80% to 85%, 85% to 90%, 90% to 95%, 95% to 99%, or more as compared to an agonistic antibody therapy alone under the same conditions or as compared to an unmodified bacteria of the same subtype under the same conditions. In some embodiments, one or more genetically engineered bacteria, e.g., adenosine consumer, kynurenine consumer, ammonia consumer, arginine producer, and/or STING agonist producer, are able to improve anti-tumor activity (e.g., tumor proliferation, size, volume, weight) of the co-administered agonistic antibodies or other immune stimulatory agonist (e.g., anti-OX40, anti-41BB, and/or anti-GITR), e.g., 1.0-1.2-fold, 1.2-1.4-fold, 1.4-1.6-fold, 1.6-1.8-fold, 1.8-2-fold, or two-fold more or more as compared to a chemotherapy alone under the same conditions or as compared to an unmodified bacteria of the same subtype under the same conditions. In some embodiments, one or more genetically engineered bacteria, e.g., adenosine consumer, kynurenine consumer, ammonia consumer, arginine producer, and/or STING agonist producer, are able to improve anti-tumor activity (e.g., tumor proliferation, size, volume, weight) of the co-administered agonistic antibody or other immune stimulatory agonist (e.g., anti-OX40, anti-41BB, and/or anti-GITR), e.g., about three-fold, four-fold, about three-fold, four-fold, five-fold, six-fold, seven-fold, eight-fold, nine-fold, ten-fold, fifteen-fold, twenty-fold, thirty-fold, forty-fold, fifty-fold, hundred-fold, five hundred-fold, or one-thousand-fold more or more as compared to a chemotherapy alone under the same conditions or as compared to an unmodified bacteria of the same subtype under the same conditions.

[1250] In some embodiments, the bacteria genetically engineered to consume adenosine are able to improve anti-tumor activity (e.g., tumor proliferation, size, volume, weight) of the co-administered agonistic antibodies or other immune stimulatory agonist (e.g., OX40 and/or GITR), e.g., by 10% to 20%, 20% to 25%, 25% to 30%, 30% to 40%, 40% to 50%, 50% to 60%, 60% to 70%, 70% to 75%, 75% to 80%, 80% to 85%, 85% to 90%, 90% to 95%, 95% to 99%, or more as compared to an agonistic antibody therapy alone under the same conditions or as compared to an unmodified bacteria of the same subtype under the same conditions. In some embodiments, the bacteria genetically engineered to consume adenosine are able to improve anti-tumor activity (e.g., tumor proliferation, size, volume, weight) of the co-administered agonistic antibodies or other immune stimulatory agonist (e.g., anti-OX40, anti-41BB, and/or anti-GITR), e.g., 1.0-1.2-fold, 1.2-1.4-fold, 1.4-1.6-fold, 1.6-1.8-fold, 1.8-2-fold, or two-fold more or more as compared to a chemotherapy alone under the same conditions or as compared to an unmodified bacteria of the same subtype under the same conditions. In some embodiments, the bacteria genetically engineered to consume adenosine are able to improve anti-tumor activity (e.g., tumor proliferation, size, volume, weight) of the co-administered agonistic antibody or other immune stimulatory agonist (e.g., anti-OX40, anti-41BB, and/or anti-GITR), e.g., about three-fold, four-fold, about three-fold, four-fold, five-fold, six-fold, seven-fold, eight-fold, nine-fold, ten-fold, fifteen-fold, twenty-fold, thirty-fold, forty-fold, fifty-fold, hundred-fold, five hundred-fold, or one-thousand-fold more or more as compared to a chemotherapy alone under the same conditions or as compared to an unmodified bacteria of the same subtype under the same conditions.

[1251] In some embodiments, the bacteria genetically engineered to consume kynurenine are able to improve anti-tumor activity (e.g., tumor proliferation, size, volume, weight) of the co-administered agonistic antibodies or other immune stimulatory agonist (e.g., anti-OX40, anti-41BB, and/or anti-GITR), e.g., by 10% to 20%, 20% to 25%, 25% to 30%, 30% to 40%, 40% to 50%, 50% to 60%, 60% to 70%, 70% to 75%, 75% to 80%, 80% to 85%, 85% to 90%, 90% to 95%, 95% to 99%, or more as compared to an agonistic antibody therapy alone under the same conditions or as compared to an unmodified bacteria of the same subtype under the same conditions. In some embodiments, the bacteria genetically engineered to consume kynurenine are able to improve anti-tumor activity (e.g., tumor proliferation, size, volume, weight) of the co-administered agonistic antibodies or other immune stimulatory agonist (e.g., anti-OX40, anti-41BB and/or anti-GITR), e.g., 1.0-1.2-fold, 1.2-1.4-fold, 1.4-1.6-fold, 1.6-1.8-fold, 1.8-2-fold, or two-fold more or more as compared to a chemotherapy alone under the same conditions or as compared to an unmodified bacteria of the same subtype under the same conditions. In some embodiments, the bacteria genetically engineered to consume kynurenine are able to improve anti-tumor activity (e.g., tumor proliferation, size, volume, weight) of the co-administered agonistic antibody or other immune stimulatory agonist (e.g., anti-OX40, anti-41BB and/or anti-GITR), e.g., about three-fold, four-fold, about three-fold, four-fold, five-fold, six-fold, seven-fold, eight-fold, nine-fold, ten-fold, fifteen-fold, twenty-fold, thirty-fold, forty-fold, fifty-fold, hundred-fold, five hundred-fold, or one-thousand-fold more or more as compared to a chemotherapy alone under the same conditions or as compared to an unmodified bacteria of the same subtype under the same conditions.

[1252] In some embodiments, the bacteria genetically engineered to produce arginine and/or consume ammonia are able to improve anti-tumor activity (e.g., tumor proliferation, size, volume, weight) of the co-administered agonistic antibodies or other immune stimulatory agonist (e.g., anti-OX40, anti-41BB and/or anti-GITR), e.g., by 10% to 20%, 20% to 25%, 25% to 30%, 30% to 40%, 40% to 50%, 50% to 60%, 60% to 70%, 70% to 75%, 75% to 80%, 80% to 85%, 85% to 90%, 90% to 95%, 95% to 99%, or more as compared to an agonistic antibody therapy alone under the same conditions or as compared to an unmodified bacteria of the same subtype under the same conditions. In some embodiments, the bacteria genetically engineered to produce arginine and/or consume ammonia are able to improve anti-tumor activity (e.g., tumor proliferation, size, volume, weight) of the co-administered agonistic antibodies or other immune stimulatory agonist (e.g., anti-OX40, anti-41BB and/or anti-GITR), e.g., 1.0-1.2-fold, 1.2-1.4-fold, 1.4-1.6-fold, 1.6-1.8-fold, 1.8-2-fold, or two-fold more or more as compared to a chemotherapy alone under the same conditions or as compared to an unmodified bacteria of the same subtype under the same conditions. In some embodiments, the bacteria genetically engineered to produce arginine and/or consume ammonia are able to improve anti-tumor activity (e.g., tumor proliferation, size, volume, weight) of the co-administered agonistic antibody or other immune stimulatory agonist (e.g., anti-OX40, anti-41BB and/or anti-GITR), e.g., about three-fold, four-fold, about three-fold, four-fold, five-fold, six-fold, seven-fold, eight-fold, nine-fold, ten-fold, fifteen-fold, twenty-fold, thirty-fold, forty-fold, fifty-fold, hundred-fold, five hundred-fold, or one-thousand-fold more or more as compared to a chemotherapy alone under the same conditions or as compared to an unmodified bacteria of the same subtype under the same conditions.

[1253] In some embodiments, the bacteria genetically engineered to produce STING agonist(s) are able to improve anti-tumor activity (e.g., tumor proliferation, size, volume, weight) of the co-administered agonistic antibodies or other immune stimulatory agonist (e.g., anti-OX40, anti-41BB, and/or anti-GITR), e.g., by 10% to 20%, 20% to 25%, 25% to 30%, 30% to 40%, 40% to 50%, 50% to 60%, 60% to 70%, 70% to 75%, 75% to 80%, 80% to 85%, 85% to 90%, 90% to 95%, 95% to 99%, or more as compared to an agonistic antibody therapy alone under the same conditions or as compared to an unmodified bacteria of the same subtype under the same conditions. In some embodiments, the bacteria genetically engineered to produce STING agonist(s) are able to improve anti-tumor activity (e.g., tumor proliferation, size, volume, weight) of the co-administered agonistic antibodies or other immune stimulatory agonist (e.g., anti-OX40, anti-41BB and/or anti-GITR), e.g., 1.0-1.2-fold, 1.2-1.4-fold, 1.4-1.6-fold, 1.6-1.8-fold, 1.8-2-fold, or two-fold more or more as compared to a chemotherapy alone under the same conditions or as compared to an unmodified bacteria of the same subtype under the same conditions. In some embodiments, the bacteria genetically engineered to produce STING agonist(s) are able to improve anti-tumor activity (e.g., tumor proliferation, size, volume, weight) of the co-administered agonistic antibody or other immune stimulatory agonist (e.g., anti-OX40, anti-41BB and/or anti-GITR), e.g., about three-fold, four-fold, about three-fold, four-fold, five-fold, six-fold, seven-fold, eight-fold, nine-fold, ten-fold, fifteen-fold, twenty-fold, thirty-fold, forty-fold, fifty-fold, hundred-fold, five hundred-fold, or one-thousand-fold more or more as compared to a chemotherapy alone under the same conditions or as compared to an unmodified bacteria of the same subtype under the same conditions.

[1254] In some embodiments, the genetically engineered microorganisms may be administered as part of a regimen, which includes other treatment modalities or combinations of other modalities. Non-limiting examples of these modalities or agents are conventional therapies (e.g., radiotherapy, chemotherapy), other immunotherapies, stem cell therapies, and targeted therapies, (e.g., BRAF or vascular endothelial growth factor inhibitors; antibodies or compounds), bacteria described herein, and oncolytic viruses. Therapies also include related to antibody-immune engagement, including Fc-mediated ADCC therapies, therapies using bispecific soluble scFvs linking cytotoxic T cells to tumor cells (e.g., BiTE), and soluble TCRs with effector functions. Immunotherapies include vaccines (e.g., viral antigen, tumor associated antigen, neoantigen, or combinations thereof), checkpoint inhibitors, cytokine therapies, adoptive cellular therapy (ACT). ACT includes but is not limited to, tumor infiltrating lymphocyte (TIL) therapies, native or engineered TCR or CAR-T therapies, natural killer cell therapies, and dendritic cell vaccines or other vaccines of other antigen presenting cells. Targeted therapies include antibodies and chemical compounds, and include for example antiangiogenic strategies and BRAF inhibition.

[1255] The immunostimulatory activity of bacterial DNA is mimicked by synthetic oligodeoxynucleotides (ODNs) expressing unmethylated CpG motifs. Bode et al., Expert Rev Vaccines. 2011 April; 10(4): 499-511. CpG DNA as a vaccine adjuvant. When used as vaccine adjuvants, CpG ODNs improve the function of professional antigen-presenting cells and boost the generation of humoral and cellular vaccine-specific immune responses. In some embodiments, CpG can be administered in combination with the genetically engineered bacteria of the invention.

[1256] In one embodiment, the genetically engineered microorganisms are administered in combination with tumor cell lysates.

[1257] The dosage of the pharmaceutical composition and the frequency of administration may be selected based on the severity of the symptoms and the progression of the cancer. The appropriate therapeutically effective dose and the frequency of administration can be selected by a treating clinician.

### Treatment In Vivo

[1258] The modified microorgansims may be evaluated in vivo, e.g., in an animal model. Any suitable animal model of a disease or condition associated with cancer may be used, e.g., a tumor syngeneic or xenograft mouse models (see, e.g., Yu et al., 2015). The genetically engineered bacteria may be administered to the animal systemically or locally, e.g., via oral administration (gavage), intravenous, or subcutaneous injection or via intratumoral injection, and treatment efficacy determined, e.g., by measuring tumor volume.

[1259] Non-limiting examples of animal models include mouse models, as described in Dang et al., 2001, Heap et al., 2014 and Danino et al., 2015).

[1260] Pre-clinical mouse models determine which immunotherapies and combination immunotherapies will generate the optimal therapeutic index (maximal anti-tumor efficacy and minimal immune related adverse events (irAEs)) in different cancers.

[1261] Implantation of cultured cells derived from various human cancer cell types or a patient's tumor mass into mouse tissue sites has been widely used for generations of cancer mouse models (xenograft modeling). In xenograft modeling, human tumors or cell lines are implanted either subcutaneously or orthotopically into immune-compromised host animals (e.g., nude or SCID mice) to avoid graft rejection. Because the original human tumor microenvironment is not recapitulated in such models, the activity of anti-cancer agents that target immune modulators may not be accurately measured in these models, making mouse models with an intact immune system more desirable.

[1262] Accordingly, implantation of murine cancer cells in a syngeneic immunocompetent host (allograft) are used to generate mouse models with tumor tissues derived from the same genetic background as a given mouse strain. In syngeneic models, the host immune system is normal, which may more closely represent the real life situation of the tumor's micro-environment. The tumor cells or cancer cell lines are implanted either subcutaneously or orthotopically into the syngeneic immunocompetent host animal (e.g., mouse). Representative murine tumor cell lines, which can be used in syngeneic mouse models for immune checkpoint benchmarking include, but are not limited to the cell lines listed in International Patent Application PCT/US2017/013072, filed Jan. 11, 2017, published as WO2017/123675, the contents of which is herein incorporated by reference in its entirety.

[1263] For tumors derived from certain cell lines, ovalbumin can be added to further stimulate the immune response, thereby increasing the response baseline level. Examples of mouse strains that can be used in syngeneic mouse models, depending on the cell line include C57BL/6, FVB/N, Balb/c, C3H, HeJ, C3H/HeJ, NOD/ShiLT, NJ, 129S1/Sv1 mJ, NOD. Additionally, several further genetically engineered mouse strains have been reported to mimic human tumorigenesis at both molecular and histologic levels. These genetically engineered mouse models also provide excellent tools to the field and additionally, the cancer cell lines derived from the invasive tumors developed in these models are also good resources for cell lines for syngeneic tumor models Examples of genetically engineered strains are provided in in International Patent Application PCT/US2017/013072, filed Jan. 11, 2017, published as WO2017/123675, the contents of which is herein incorporated by reference in its entirety.

[1264] Often potential therapeutic molecules which interact with human immune modulators and stimulate human immune system and do not detect their murine counterparts and vice versa. In studying therapeutic molecules, it is necessary to take this in consideration. More recently, “humanized” mouse models have been developed, in which immunodeficient mice are reconstituted with a human immune system, and which have helped overcome issues relating to the differences between the mouse and human immune systems, allowing the in vivo study of human immunity. Severely immunodeficient mice which combine the IL2receptor null and the severe combined immune deficiency mutation (scid) (NOD-scid IL2Rgnull mice) lack mature T cells, B cells, or functional NK cells, and are deficient in cytokine signaling. These mice can be engrafted with human hematopoietic stem cells and peripheral-blood mononuclear cells. CD34+ hematopoietic stem cells (hu-CD34) are injected into the immune deficient mice, resulting in multi-lineage engraftment of human immune cell populations including very good T cell maturation and function for long-term studies. This model has a research span of 12 months with a functional human immune system displaying T-cell dependent inflammatory responses with no donor cell immune reactivity towards the host. Patient derived xenografts can readily be implanted in these models and the effects of immune modulatory agents studied in an in vivo setting more reflective of the human tumor microenvironment (both immune and non-immune cell-based) (Baia et al., 2015). Human cell lines of interest for use in the humanized mouse models include but are not limited to HCT-116 and HT-29 colon cancer cell lines.

[1265] A rat F98 glioma model and the utility of spontaneous canine tumors, as described in Roberts et al 2014, the contents of each of which are herein incorporated by reference in their entireties. Locally invasive tumors generated by implantation of F98 rat glioma cells engineered to express luciferase were intratumorally injected with C. novyi-NT spores, resulting in germination and a rapid fall in luciferase activity. C. novyi-NT germination was demonstrated by the appearance of vegetative forms of the bacterium. In these studies, C. novyi-NT precisely honed to the tumor sparing neighboring cells.

[1266] Canine soft tissue sarcomas for example are common in many breeds and have clinical, histopathological, and genetically features similar to those in humans (Roberts et al, 2014; Staedtke et al., 2015), in particular, in terms of genetic alterations and spectrum of mutations. Roberts et al. conducted a study in dogs, in which C. novyi-NT spores were intratumorally injected (1×10⁸ C. novyi-NT spores) into spontaneously occurring solid tumors in one to 4 treatment cycles and followed for 90 days. A potent inflammatory response was observed, indicating that the intratumoral injections mounted an innate immune response.

[1267] In some embodiments, the genetically engineered microorganisms of the invention are administered systemically, e.g., orally, subcutaneously, intravenously or intratumorally into any of the models described herein to assess anti-tumor efficacy and any treatment related adverse side effects.

### Sequences

[1268] In some embodiments, certain precursor sequences are replaced with one or more bacterial sequences, including but not limited to bacterial secretion signal sequences. In some embodiments, the polynucleotide sequence encoding the cytokines are codon-optimized for bacterial expression. In some embodiments, certain precursor sequences are replaced with one or more mammalian sequences, including but not limited to mammalian secretion signal sequences. In some embodiments, the polynucleotide sequence encoding the cytokines are codon-optimized for mammalian expression.

[1269] In some embodiments, the genetically engineered bacteria comprise gene sequences encoding immune modulatory cytokines. In some embodiments, the genetically engineered bacteria comprise one or more gene sequences for the expression of hIL-12. In some embodiments, genetically engineered bacteria comprise one or more gene sequences that encode a polypeptide of SEQ ID NO: 1053. In some embodiments, genetically engineered bacteria comprise one or more gene sequences that encode a polypeptide of SEQ ID NO: 1054.

[1270] In some embodiments, the genetically engineered bacteria comprise one or more gene sequences for the expression of hIL-15. In some embodiments, genetically engineered bacteria comprise one or more gene sequences that encode a polypeptide of SEQ ID NO: 1057.

[1271] In some embodiments, the genetically engineered bacteria comprise one or more gene sequences for the expression of GMCSF. In some embodiments, genetically engineered bacteria comprise one or more gene sequences that encode a polypeptide of SEQ ID NO: 1058.

[1272] In some embodiments, the genetically engineered bacteria comprise one or more gene sequences for the expression of TNFα, e.g., the extracellular portion. In some embodiments, genetically engineered bacteria comprise one or more gene sequences that encode a polypeptide of SEQ ID NO: 1059.

[1273] In some embodiments, the genetically engineered bacteria comprise one or more gene sequences for the expression of IFN-gamma. In some embodiments, genetically engineered bacteria comprise one or more gene sequences that encode a polypeptide of SEQ ID NO: 1060.

[1274] In some embodiments, the genetically engineered bacteria comprise one or more gene sequences for the expression of CXCL10. In some embodiments, genetically engineered bacteria comprise one or more gene sequences that encode a polypeptide of SEQ ID NO: 1061.

[1275] In some embodiments, the genetically engineered bacteria comprise one or more gene sequences for the expression of CXCL9. In some embodiments, genetically engineered bacteria comprise one or more gene sequences that encode a polypeptide of SEQ ID NO: 1062.

[1276] In some embodiments, genetically engineered bacteria comprise a nucleic acid sequence that encodes a polypeptide that is at least about 80%, at least about 85%, at least about 90%, at least about 95%, or at least about 99% homologous to SEQ ID NO: 1053, SEQ ID NO: 1054, SEQ ID NO: 1055, SEQ ID NO: 1056, SEQ ID NO: 1057, SEQ ID NO: 1058, SEQ ID NO: 1059, SEQ ID NO: 1060, SEQ ID NO: 1061 SEQ, and ID NO: 1062. In some embodiments, genetically engineered bacteria comprise a nucleic acid sequence that encodes a polypeptide that comprise a sequence selected from SEQ ID NO: 1053, SEQ ID NO: 1054, SEQ ID NO: 1055, SEQ ID NO: 1056, SEQ ID NO: 1057, SEQ ID NO: 1058, SEQ ID NO: 1059, SEQ ID NO: 1060, SEQ ID NO: 1061 SEQ, and ID NO: 1062. In some embodiments, genetically engineered bacteria comprise a nucleic acid sequence that encodes a polypeptide that consists of a sequence selected from SEQ ID NO: 1053, SEQ ID NO: 1054, SEQ ID NO: 1055, SEQ ID NO: 1056, SEQ ID NO: 1057, SEQ ID NO: 1058, SEQ ID NO: 1059, SEQ ID NO: 1060, SEQ ID NO: 1061 SEQ, and ID NO: 1062.

[1277] In some embodiments, the genetically engineered bacteria comprise a gene sequence that but for the redundancy of the genetic code encodes the same polypeptide as SEQ ID NO: 1063. In some embodiments, the genetically engineered bacteria comprise SEQ ID NO: 1063. In some embodiments, the genetically engineered bacteria comprise a gene sequence that but for the redundancy of the genetic code encodes the same polypeptide as SEQ ID NO: 1064. In some embodiments, the genetically engineered bacteria comprise a gene sequence SEQ ID NO: 1064. In some embodiments, the genetically engineered bacteria comprise a gene sequence that but for the redundancy of the genetic code encodes the same polypeptide as SEQ ID NO: 1067 In some embodiments, the genetically engineered bacteria comprise SEQ ID NO: 1067. In some embodiments, the genetically engineered bacteria comprise a gene sequence that but for the redundancy of the genetic code encodes the same polypeptide as SEQ ID NO: 1068 In some embodiments, the genetically engineered bacteria comprise SEQ ID NO: 1068. In some embodiments, the genetically engineered bacteria comprise a gene sequence that but for the redundancy of the genetic code encodes the same polypeptide as SEQ ID NO: 1069 In some embodiments, the genetically engineered bacteria comprise SEQ ID NO: 1069. In some embodiments, the genetically engineered bacteria comprise a gene sequence In some embodiments, the genetically engineered bacteria comprise a gene sequence that but for the redundancy of the genetic code encodes the same polypeptide as SEQ ID NO: 1070. In some embodiments, the genetically engineered bacteria comprise SEQ ID NO: 1070 In some embodiments, the genetically engineered bacteria comprise a gene sequence that but for the redundancy of the genetic code encodes the same polypeptide as SEQ ID NO: 1071 In some embodiments, the genetically engineered bacteria comprise SEQ ID NO: 1071. In some embodiments, genetically engineered bacteria comprise a nucleic acid sequence that is at least about 80%, at least about 85%, at least about 90%, at least about 95%, or at least about 99% homologous to the DNA sequence of SEQ ID NO: 1063, SEQ ID NO: 1064, SEQ ID NO: 1067, SEQ ID NO: 1068, SEQ ID NO: 1069, SEQ ID NO: 1070, and/or SEQ ID NO: 1071. In some embodiments, genetically engineered bacteria comprise a nucleic acid sequence comprising a sequence selected from SEQ ID NO: 1063, SEQ ID NO: 1064, SEQ ID NO: 1067, SEQ ID NO: 1068, SEQ ID NO: 1069, SEQ ID NO: 1070, and/or SEQ ID NO: 1071. In some embodiments, genetically engineered bacteria comprise a nucleic acid sequence consisting of a sequence selected from SEQ ID NO: 1063, SEQ ID NO: 1064, SEQ ID NO: 1067, SEQ ID NO: 1068, SEQ ID NO: 1069, SEQ ID NO: 1070, and/or SEQ ID NO: 1071.

[1278] In some embodiments, genetically engineered bacteria comprise a nucleic acid sequence that is at least about 80%, at least about 85%, at least about 90%, at least about 95%, or at least about 99% homologous to the DNA sequence of SEQ ID NO: 894, SEQ ID NO: 895, SEQ ID NO: 896, SEQ ID NO: 897, SEQ ID NO: 898, SEQ ID NO: 899, SEQ ID NO: 900, SEQ ID NO: 901, SEQ ID NO: 902, SEQ ID NO: 903, SEQ ID NO: 904, SEQ ID NO: 905, SEQ ID NO: 906, SEQ ID NO: 907, SEQ ID NO: 908, SEQ ID NO: 909, SEQ ID NO: 910, SEQ ID NO: 911, SEQ ID NO: 912, and/or SEQ ID NO: 913. In some embodiments, genetically engineered bacteria comprise a nucleic acid sequence comprising a the DNA sequence selected from SEQ ID NO: 894, SEQ ID NO: 895, SEQ ID NO: 896, SEQ ID NO: 897, SEQ ID NO: 898, SEQ ID NO: 899, SEQ ID NO: 900, SEQ ID NO: 901, SEQ ID NO: 902, SEQ ID NO: 903, SEQ ID NO: 904, SEQ ID NO: 905, SEQ ID NO: 906, SEQ ID NO: 907, SEQ ID NO: 908, SEQ ID NO: 909, SEQ ID NO: 910, SEQ ID NO: 911, SEQ ID NO: 912, and/or SEQ ID NO: 913. In some embodiments, genetically engineered bacteria comprise a nucleic acid sequence consisting of DNA sequence selected from SEQ ID NO: 894, SEQ ID NO: 895, SEQ ID NO: 896, SEQ ID NO: 897, SEQ ID NO: 898, SEQ ID NO: 899, SEQ ID NO: 900, SEQ ID NO: 901, SEQ ID NO: 902, SEQ ID NO: 903, SEQ ID NO: 904, SEQ ID NO: 905, SEQ ID NO: 906, SEQ ID NO: 907, SEQ ID NO: 908, SEQ ID NO: 909, SEQ ID NO: 910, SEQ ID NO: 911, SEQ ID NO: 912, and/or SEQ ID NO: 913.

[1279] In some embodiments, genetically engineered bacteria comprise a nucleic acid sequence that is at least about 80%, at least about 85%, at least about 90%, at least about 95%, or at least about 99% homologous to the DNA sequence of SEQ ID NO: 914, SEQ ID NO: 915, SEQ ID NO: 916, SEQ ID NO: 917, SEQ ID NO: 918, and SEQ ID NO: 919. In some embodiments, genetically engineered bacteria comprise a nucleic acid sequence comprising a DNA sequence selected from SEQ ID NO: 914, SEQ ID NO: 915, SEQ ID NO: 916, SEQ ID NO: 917, SEQ ID NO: 918, and SEQ ID NO: 919. In some embodiments, genetically engineered bacteria comprise a nucleic acid sequence consisting of a DNA sequence selected from SEQ ID NO: 914, SEQ ID NO: 915, SEQ ID NO: 916, SEQ ID NO: 917, SEQ ID NO: 918, and SEQ ID NO: 919.

[1280] In one embodiment, genetically engineered bacteria comprise a gene sequence encoding a human IL-12a construct with a N terminal OmpF secretion tag, e.g., SEQ ID NO: 920. In one embodiment, genetically engineered bacteria comprise a gene sequence encoding a human IL-12a construct with a N terminal PhoA secretion tag, e.g., SEQ ID NO: 921. In one embodiment, genetically engineered bacteria comprise a gene sequence encoding a human IL-12a construct with a N terminal TorA secretion tag, e.g., SEQ ID NO: 922. In one embodiment, genetically engineered bacteria comprise a gene sequence encoding a human IL-12b construct with a N terminal OmpF secretion tag, e.g., SEQ ID NO: 923. In one embodiment, genetically engineered bacteria comprise a gene sequence encoding a human IL-12b construct with a N terminal PhoA secretion tag, e.g., SEQ ID NO: 924. In one embodiment, genetically engineered bacteria comprise a gene sequence encoding a human IL-12 construct with a N terminal TorA secretion tag, e.g., SEQ ID NO: 925. In one embodiment, genetically engineered bacteria comprise a gene sequence encoding a human GMCSF construct with a N terminal OmpF secretion tag, e.g., SEQ ID NO: 932. In one embodiment, genetically engineered bacteria comprise a gene sequence encoding a human GMCSF construct with a N terminal PhoA secretion tag, e.g., SEQ ID NO: 933. In one embodiment, genetically engineered bacteria comprise a gene sequence encoding a human GMCSF construct with a N terminal TorA secretion tag, e.g., SEQ ID NO: 934.

[1281] In one embodiment, genetically engineered bacteria comprise a gene sequence encoding a human IL-15 construct with a N terminal OmpF secretion tag, e.g., SEQ ID NO: 935. In one embodiment, genetically engineered bacteria comprise a gene sequence encoding a human IL-15 construct with a N terminal PhoA secretion tag, e.g., SEQ ID NO: 936. In one embodiment, genetically engineered bacteria comprise a gene sequence encoding a human IL-15 construct with a N terminal TorA secretion tag, e.g., SEQ ID NO: 937. In one embodiment, genetically engineered bacteria comprise a gene sequence encoding a human TNFα construct with a N terminal OmpF secretion tag, e.g., SEQ ID NO: 938. In one embodiment, genetically engineered bacteria comprise a gene sequence encoding a human TNFα construct with a N terminal PhoA secretion tag, e.g., SEQ ID NO: 939. In one embodiment, genetically engineered bacteria comprise a gene sequence encoding a human TNFα construct with a N terminal TorA secretion tag, e.g., SEQ ID NO: 940. In one embodiment, genetically engineered bacteria comprise a gene sequence encoding a human IFNg construct with a N terminal OmpF secretion tag, e.g., SEQ ID NO: 941. In one embodiment, genetically engineered bacteria comprise a gene sequence encoding a human IFNg construct with a N terminal PhoA secretion tag, e.g., SEQ ID NO: 942. In one embodiment, genetically engineered bacteria comprise a gene sequence encoding a human IFNgamma construct with a N terminal TorA secretion tag, e.g., SEQ ID NO: 943. In one embodiment, genetically engineered bacteria comprise a gene sequence encoding a human CXCL9 construct with a N terminal OmpF secretion, e.g., SEQ ID NO: 1075. In one embodiment, genetically engineered bacteria comprise a gene sequence encoding a human CXCL9 construct with a N terminal PhoA secretion tag, e.g., SEQ ID NO: 1076. In one embodiment, genetically engineered bacteria comprise a gene sequence encoding a human CXCL9 construct with a N terminal TorA secretion tag, e.g., SEQ ID NO: 1077.

[1282] In some embodiments, genetically engineered bacteria comprise a gene sequence, which encodes a polypeptide that is at least about 80%, at least about 85%, at least about 90%, at least about 95%, or at least about 99% homologous to a polypeptide sequence selected from SEQ ID NOs: 920-943 or 1072-1078, or a functional fragment or variant thereof. In some embodiments, genetically engineered bacteria comprise a gene sequence, which encodes a polypeptide that is at least about 80%, at least about 85%, at least about 90%, at least about 95%, or at least about 99% homologous to a polypeptide sequence selected from SEQ ID NOs: 920-943 or 1072-1078. In some embodiments, genetically engineered bacteria comprise a gene sequence, which encodes a polypeptide comprising a sequence selected from SEQ ID NOs: 920-943 or 1072-1078. In some embodiments, genetically engineered bacteria comprise a gene sequence, which encodes a polypeptide consisting of a sequence selected from SEQ ID NOs: 920-943 or 1072-1078.

[1283] In some embodiments, genetically engineered bacteria comprise one or more nucleic acid sequences selected from SEQ ID NOs: 953-960 and SEQ ID NOs: 1081-1084. In some embodiments, genetically engineered bacteria comprise a nucleic acid sequence that is at least about 80%, at least about 85%, at least about 90%, at least about 95%, or at least about 99% homologous to one or more DNA sequences selected from SEQ ID NOs: 953-960 and SEQ ID NOs: 1081-1084.

[1284] In one embodiment, genetically engineered bacteria comprise a gene sequence comprising a construct comprising both human IL-12a and human IL-12b. In one embodiment, genetically engineered bacteria comprise a gene sequence comprising the phoA-hIL12b-phoA-hIL12a portion of SEQ ID NO: 965 or the phoA-mIL12b-phoA-mIL12a portion of SEQ ID NO: 966.

[1285] In one embodiment, genetically engineered bacteria comprise a gene sequence comprising a construct comprising phoA-IL15. In one embodiment, genetically engineered bacteria comprise a gene sequence comprising the phoA-IL15 portion of SEQ ID NO: 967

[1286] In one embodiment, genetically engineered bacteria comprise a gene sequence comprising a construct comprising phoA-GMCSF. In one embodiment, genetically engineered bacteria comprise a gene sequence comprising the phoA-GMCSF portion of SEQ ID NO: 968.

[1287] In one embodiment, genetically engineered bacteria comprise a gene sequence comprising a construct comprising phoA-TNFα. In one embodiment, genetically engineered bacteria comprise a gene sequence comprising the phoA-TNFα portion of SEQ ID NO: 969.

[1288] In one embodiment, genetically engineered bacteria comprise a gene sequence comprising a construct comprising phoA-IFNgamma. In one embodiment, genetically engineered bacteria comprise a gene sequence comprising the phoA-IFNgamma portion of SEQ ID NO: 970.

[1289] In some embodiments, genetically engineered bacteria comprise a nucleic acid sequence that is at least about 80%, at least about 85%, at least about 90%, at least about 95%, or at least about 99% homologous a DNA sequence selected from SEQ ID NOs: 965, SEQ ID NO: 966, SEQ ID NO: 967, SEQ ID NO: 968, SEQ ID NO: 969, SEQ ID NO: 970, excluding the non-coding regions.

### EXAMPLES

[1290] The following examples provide illustrative embodiments of the disclosure. One of ordinary skill in the art will recognize the numerous modifications and variations that may be performed without altering the spirit or scope of the disclosure. Such modifications and variations are encompassed within the scope of the disclosure. The Examples do not in any way limit the disclosure.

[1291] The disclosure provides herein a sequence having at least about 80%, at least about 85%, at least about 90%, at least about 95%, or at least about 99% homologous to the sequence any of the SEQ ID NOs described in the Examples, below.

### Example 1. Immune Modulators

[1292] Exemplary nucleic acid sequences for use in constructing single-chain anti-CTLA-4 antibodies are described in International Patent Application PCT/US2017/013072, filed Jan. 11, 2017, published as WO2017/123675, the contents of which is herein incorporated by reference in its entirety, for example in Example 1. In some embodiments, genetically engineered bacteria comprise a nucleic acid sequence that is at least about 80%, at least about 85%, at least about 90%, at least about 95%, or at least about 99% homologous to the DNA sequence or comprises a DNA sequence that encodes a polypeptide that is at least about 80%, at least about 85%, at least about 90%, at least about 95%, or at least about 99% homologous to SEQ ID NO: 765, SEQ ID NO: 766, SEQ ID NO: 767, SEQ ID NO: 768, SEQ ID NO: 769, SEQ ID NO: 770, SEQ ID NO: 771, SEQ ID NO: 772, SEQ ID NO: 773, SEQ ID NO: 774, SEQ ID NO: 775, and/or SEQ ID NO: 776. In another embodiment, the genetically engineered bacteria comprise a gene sequence encoding a polypeptide comprising a sequence selected from SEQ ID NO: 765, SEQ ID NO: 766, SEQ ID NO: 767, SEQ ID NO: 768, SEQ ID NO: 769, SEQ ID NO: 770, SEQ ID NO: 771, SEQ ID NO: 772, SEQ ID NO: 773, SEQ ID NO: 774, SEQ ID NO: 775, and/or SEQ ID NO: 776. In yet another embodiment, the polypeptide expressed by the genetically engineered bacteria consists of a sequence selected from SEQ ID NO: 765, SEQ ID NO: 766, SEQ ID NO: 767, SEQ ID NO: 768, SEQ ID NO: 769, SEQ ID NO: 770, SEQ ID NO: 771, SEQ ID NO: 772, SEQ ID NO: 773, SEQ ID NO: 774, SEQ ID NO: 775, and/or SEQ ID NO: 776.

[1293] In some embodiments, genetically engineered bacteria comprise a nucleic acid sequence that is at least about 80%, at least about 85%, at least about 90%, at least about 95%, or at least about 99% homologous to the DNA sequence or comprises a DNA sequence that encodes a polypeptide that is at least about 80%, at least about 85%, at least about 90%, at least about 95%, or at least about 99% homologous to SEQ ID NO: 777, SEQ ID NO: 778, SEQ ID NO: 779, SEQ ID NO: 780, SEQ ID NO: 781, SEQ ID NO: 782, SEQ ID NO: 783, SEQ ID NO: 784, SEQ ID NO: 785, SEQ ID NO: 786, SEQ ID NO: 787, and/or SEQ ID NO: 788. In another embodiment, the gene sequence comprises a sequence selected from SEQ ID NO: 777, SEQ ID NO: 778, SEQ ID NO: 779, SEQ ID NO: 780, SEQ ID NO: 781, SEQ ID NO: 782, SEQ ID NO: 783, SEQ ID NO: 784, SEQ ID NO: 785, SEQ ID NO: 786, SEQ ID NO: 787, and/or SEQ ID NO: 788. In another embodiment, the gene sequences consists of a sequence selected from SEQ ID NO: 777, SEQ ID NO: 778, SEQ ID NO: 779, SEQ ID NO: 780, SEQ ID NO: 781, SEQ ID NO: 782, SEQ ID NO: 783, SEQ ID NO: 784, SEQ ID NO: 785, SEQ ID NO: 786, SEQ ID NO: 787, and/or SEQ ID NO: 788.

### Example 2. Tumor Pharmacokinetics for E. coli Nissle

[1294] Tumor pharmacokinetics were assayed and determined as described in are described in International Patent Application PCT/US2017/013072, filed Jan. 11, 2017, published as WO2017/123675, the contents of which is herein incorporated by reference in its entirety, e.g., Example 58-61. Tumor pharmacokinetics of Nissle (1e7 and 1e8 cells/dose) were determined using a CT26 tumor model over 7 days. Bacterial counts in the tumor tissue were similar at both doses. No bacteria were detected in blood at any of the time points.

[1295] Tumor pharmacokinetics of streptomycin resistant Nissle and a Nissle DOM mutant (Nissle ΔPAL::CmR) were compared in a CT26 tumor model. Bacterial counts in the tumor tissue were similar in both strains. No bacteria were detected in the blood. These results indicate that both the wild type and the DOM mutant Nissle can survive in the tumor environment.

[1296] Cytokine response in vivo to intratumoral administration of streptomycin resistant Nissle was assessed using a CT26 tumor model at either 1e6 (Group1) or 1e7 cells/dose (Group 2). Levels measured in serum and in the tumor over the time course post SYN94 intratumoral administration in the mouse CT-24 model at the indicated doses. Results indicate that a cytokine response is elicited in the tumor at the higher dose but not in the serum. The lower dose does not elicit a substantial cytokine response.

[1297] Tumoral PK, levels of bacteria in various tissues and cytokine levels in these tissues were assessed post IT dosing (1e7 cells/dose) at 48 hours. As seen in Internationals Patent Application PCT/US2017/013072, incorporated herein by reference, bacteria were predominantly present in the tumor and absent in other tissues tested. TNFα levels measured were similar in all serum, tumor and liver between SYN94, Saline treated and naïve groups. TNFα levels are negligible relative to TNFα levels measured at 1.5 hours when Nissle is administered at 1e8 via IV. However, even with IV administration, TNFα levels drop off to undetectable levels at 4 hours Similar low levels of TNFα are detected at a 1e6 IV dose of SYN94.

### Example 3A. LC-MS/MS Quantification of Metabolites

[1298] Quantification of adenosine, kynurenine, tryptophan and arginine in bacterial supernatants and in tumor tissues was performed by LC-MS/MS as described in International Patent Application PCT/US2017/013072, filed Jan. 11, 2017, published as WO2017/123675, the contents of which is herein incorporated by reference in its entirety.

### Example 3B. Engineering Bacterial Strains Using Chromosomal Insertions

[1299] Methods for the integration of constructs into the E. coli Nissle genome are described in Internationals Patent Application PCT/US2017/013072, incorporated herein by reference.

### Example 4. Generation of Adenosine Degrading Strains

[1300] A schematic representation of the 3 operons in the adenosine degradation pathway is shown in FIG. 47 and FIG. 48. To generate Adenosine consuming strains, each one of the operons (or single gene in the case of nupC) were cloned into a KIKO vector under the control of the p_{fnrS} promoter. Knock-in PCR products were made from the KIKO vectors and allelic exchange was performed to integrate these operons into E. coli genome. Allelic exchange was facilitated through use of the lambda red recombinase system as described herein. Multiple strain combinations were generated and Table 13. summarizes the strains generated and compared in adenosine degradation assays. Table 14. summarizes the integration sites that were used for each of the constructs.

TABLE 13
Adenosine consuming strains

| Strain: | Genotype |
|---|---|
| SYN01 | WT |
| SYN1565 | P_{fnrS}-nupC |
| SYN1584 | P_{fnrS}-nupC; P_{fnrS}-xdhABC |
| SYN1655 | P_{fnrS}-nupC; P_{fnrS}-add-xapA-deoD |
| SYN1656 | P_{fnrS}-nupC; P_{fnrS}-xdhABC; P_{fnrS}-add-xapA-deoD |

TABLE 14
Integration sites (can also see strain table)

| Construct | Chromosomal Integration Site |
|---|---|
| P_{fnrS}-nupC | integrated into HA1/2 (ugaI/rsmI) region |
| P_{fnrS}-xdhABC | integrated into HA9/10 (exo/cea) region |
| P_{fnrS}-add-xapA-deoD | integrated into malE/K region |

### Example 5. In Vitro Adenosine Degradation Measurements

### In Vitro Adenosine Consumption

[1301] Glucose is the preferred carbon source of E. coli. However, E. coli can also use adenosine as a sole source of carbon in the absence of glucose. To assess the ability of the newly generated strains to degrade adenosine, and if able to do so even in the presence of the preferred carbon source, glucose.

[1302] To accomplish this, overnight cultures of each strain including a wild type control were grown in LB at 37 C, shaking at 250 rpm. Cultures were back diluted 1:100 (10 mL in 125 mL baffled flask) and grown for 1.5 hours to early log phase. Once cultures reached early log, cultures were moved into a Coy anaerobic chamber supplying an anaerobic atmosphere (85% N₂, 10% CO₂, 5% H₂). Cultures were incubated anaerobically for 4 hours to allow for induction of the engineered adenosine degradation pathway gene(s).

[1303] Cultures were removed from the anaerobic chamber and tested for adenosine degradation activity. To accomplish this, ˜1e8 activated bacterial cells were spun down in 1.5 mL microcentrifuge tubes and resuspended in adenosine assay buffer (1× M9 minimal media containing 10 mM adenosine that either contained no glucose or 0.5% glucose (see slide)). Tubes were incubated statically at 37 degrees Celsius for 5h, and supernatant samples were removed every hour for 5h. Supernatant samples were analyzed via LC-MS for determination of adenosine concentration.

[1304] Results are show in FIG. 3. and indicate that all engineered strains were able to degrade adenosine (determined by its absence in the supernatant samples) at a rate higher than that of the wild type control strain. All strains were able to degrade adenosine regardless whether E. coli's preferred carbon source, glucose, was present.

### In Vitro Activity Under Substrate Limited Conditions

[1305] In the previous study, substrate was not limiting, i.e., strains were able to function at Vₘₐₓ. Such substrate concentrations were far in excess of concentrations expected in vivo. Next, adenosine degradation ability of the engineered bacteria was assessed at more limiting substrate concentrations (more consistent with adenosine concentrations in a tumor in vivo), and at lower doses (more consistent with doses which can be administered IV or IT in a mouse without causing sepsis).

[1306] Overnight cultures of each strain were grown in LB at 37 C, shaking at 250 rpm. Cultures were back diluted 1:100 (10 mL in 125 mL baffled flask) and grown for 1.5 hours to early log phase. Once cultures reached early log, they were moved into a Coy anaerobic chamber supplying an anaerobic atmosphere (85% N₂, 10% CO₂, 5% H₂). Cultures were incubated anaerobically for 4 hours to allow for induction of the engineered adenosine degradation pathway gene(s).

[1307] Activated cells were quantitated on a cellometer and diluted in PBS to 5e8 cfu/mL. 10 uL of this suspension (comprising 5e6 bacteria) were resuspended in 1 mL of adenosine assay buffer comprised of M9 minimal media, 0.5% glucose, and 100 uM adenosine. Cells were incubated statically at 37 C. Supernatant samples were removed every hour for 5 hours to determine rates of adenosine degradation. Supernatant samples were analyzed via LC-MS for determination of adenosine concentration. Rates of degradation reported are the maximal linear rates between 0 to 5 hours of sampling (this may not include the later time points as rates may not be linear at extremely low substrate (adenosine) degradation).

[1308] Results are shown in FIGS. 5 and 6 and indicate that all engineered strains were able to degrade adenosine (determined by its absence in the supernatant samples) at a rate higher than that of control strain SYN01. SYN1656, the most highly engineered strain containing all three integrations comprising the adenosine degradation pathway, was able to degrade adenosine at the highest rate and to take adenosine levels to undetectable levels by 3 hours.

[1309] The linear rate is shown in Table 15.

TABLE 15
Linear Adenosine Degradation Rates

| | Linear Rate (umol/hr/10⁹ cells) |
|---|---|
| SYN001 | 1.95 |
| SYN1552 | 5.90 |
| SYN1584 | 6.39 |
| SYN1655 | 5.65 |
| SYN1656 | 6.88 |

### Example 6. Effect of Adenosine Consuming Strains In Vivo

[1310] The effects of an adenosine consuming strain SYN1656 (comprising P_{fnrS}-nupC; P_{fnrS}-xdhABC; P_{fnrS}-add-xapA-deoD) in vivo was assessed, alone and in combination with anti-PD1.

[1311] CT26 cells obtained from ATCC were cultured according to guidelines provided. Approximately ˜1e6cells/mouse in PBS were implanted subcutaneously into the right flank of each animal (BalbC/J (female, 8 weeks)), and tumor growth was monitored for approximately 10 days. When the tumors reached about ˜100-150 mm3, animals were randomized into groups for dosing.

[1312] To prepare the cells, streptomycin resistant Nissle (SYN094) was grown in LB broth until reaching an absorbance at 600 nm (A600 nm) of 0.4 (corresponding to 2×108 colony-forming units (CFU)/mL) and washed twice in PBS. The suspension was diluted in PBS or saline so that 100 microL can be injected at the appropriate doses intratumorally into tumor-bearing mice. To prepare the SYN1656, cells were diluted 1:100 in LB (2 L), grown for 1.5 h aerobically, then shifted to the anaerobe chamber for 4 hours. Prior to administration, cells were concentrated 200× and frozen (15% glycerol, 2 g/L glucose, in PBS).

[1313] Approximately 10 days after CT 26 implantation, on day 1, bacteria were suspended in 0.1 ml of PBS and mice were weighed, measured, and randomized into treatment groups as follows: Group 1 saline injection (100 ul) (n=14); Group 2 SYN94 IT 10e7 (n=14); Group 3—SYN1656 IT 10e7 (n=14);

[1314] Group 4—SYN1656 IT 10e7 plus aPD-1 (BioXcell), 10 mg/kg, i.p. (n=14); Group 5—aPD-1 (BioXcell), 10 mg/kg, i.p (n=9).

[1315] On day 1 and day 4, animals were dosed according to their grouping either with saline or with the strains intratumorally (IT) alone or in combination with anti-PD1 (I.P). Plasma and were collected for further analysis. FIG. 49 shows the tumor volume of the mice from day 1, 4, and 7. Results show that the tumor volume is decreased in all three treatment groups (SYN1656, anti-PD1, and SYN1656 plus anti-PD1) as compared to the saline treated controls at 7 days; tumor size is smallest in the SYN1656 and anti-PD1 treated group, followed by SYN1656 alone and anti-PD1 alone, indicating that there may be a synergistic effect between the two treatments, and suggesting anti-tumor activity of adenosine-consuming strain as single agent and in combination with aPD-1. Tumor volume was significantly lower in the animals treated with SYN1656 and anti-PD1 than with saline alone (p=0.01). Tumor volume of animals treated with SYN1656 and anti-PD1 was also significantly lower than animals treated with anti-PD1 alone.

[1316] In other studies, this study is extended to include dosing and analysis at days 10, 15, and 18, until animals reach a tumor size of approximately 2000 mm³.

### Example 7. Adaptive Laboratory Evolution (ALE)

[1317] First, strains were generated, which comprise the trpE knock out and integrated constructs for the expression of Pseudomonas fluorescens KYNase driven by a constitutive promoter, as described in International Patent Application PCT/US2017/013072, filed on Jan. 11, 2017, published as WO2017/123675; and International Patent Application PCT/US2018/012698, filed on Jan. 5, 2018, the contents of which are incorporated by reference in their entirety. KYNase constructs were integrated at the HA3/4 site, and two different promoters were used; the promoter of the endogenous 1pp gene was used in parental strain SYN2027 (HA3/4::Plpp-pKYNase KanR TrpE::CmR) and the synthetic pSynJ23119 was used in parental strain SYN2028 (HA3/4::PSynJ23119-pKYNase KanR TrpE::CmR). These strains were generated so that a strain would be evolved, which would comprise a chromosomally integrated version of Pseudomonas fluorescens KYNase. These strains were validated in the checkerboard assay (e.g., as described in PCT/US2017/013072) to have similar ALE parameters to their plasmid-based Ptet counterpart. Lower limit of kynurenine (KYN) and ToxTrp concentration for use in the ALE experiment were established using the checkerboard assay described in PCT/US2017/013072, and lower limit concentrations corresponded to those observed for the strains expressing tet inducible KYNase from a medium copy plasmid.

[1318] Mutants derived from parental strains SYN2027 and SYN2028 were evolved by passaging in lowering concentrations of KYN and three different ToxTrp concentrations as follows.

[1319] The ALE parental strains were cultured on plates with M9 minimal media supplemented with glucose and L-kynurenine (M9+KYN). A single colony from each parent was selected, resuspended in 20 uL of sterile phosphate-buffered saline solution. This colony was then used to inoculate two cultures of M9+KYN, grown into late-logarithmic phase and the optical density was determined at 600 nm. These cultures were then diluted to 10³ in 3 columns of a 96-well deep-well plate with 1 mL of M9+KYNU. Each one of the three rows had different ToxTrp concentrations (increasing 2-fold), while each column had decreasing concentrations of KYN (by 2-fold). Every 12 hours, the plate was diluted back using 30 uL from the well in which the culture had grown to an OD600 of roughly 0.1. This process was repeated for five days, and then the ToxTrp concentrations were doubled to maintain selection pressure. After two weeks' time, no growth rate increases were detected and the culture was plated onto M9+KYN. All culturing was done shaking at 350 RPM at 37° C. Individual colonies were selected and screened in M9+KYN+ToxTrp media to confirm increased growth rate phenotype.

[1320] Two replicates for each parental strain (SYN20207-R1, SYN2027-R2, SYN2028-R1, and SYN2028-R2) were selected and assayed for kynurenine production.

[1321] Briefly, overnight cultures were diluted 1:100 in 400 ml LB and let grow for 4 hours. Next, 2 ml of the culture was spun down and resuspended in 2 ml M9 buffer. The OD600 of the culture was measured (1/100 dilution in PBS). The necessary amount of cell culture for a 3 ml assay targeting starting cell count of ˜OD 0.8 (˜1E8) was spun down. The cell pellet was resuspended in M9+0.5% glucose+75 uM KYN in the assay volume (3 ml) in a culture tube. 220 ul was removed in triplicate at each time point (t=0, 2, and 3 hours) into conical shaped 96WP, and 4 ul were removed for cfu measurement at each time point. At each time point, the sample was spun down in the conical 96WP for 5 minutes at 3000 g, and 200 ul were transferred from each well into a clear, flat-bottomed, 96WP. A kynurenine standard curve and blank sample was prepared in the same plate. Next, 40 ul of 30% Tri-Chloric Acid (v/v) was added to each well and mixed by pipetting up and down. The plat was sealed with aluminum foil and incubated at 60 C for 15 minutes. The plate was the spun down at 11500 rpm, at 4 C, for 15 minutes, and 125 ul from each well were aliquoted and mixed with 125 ul of 2% Ehrlich's reagent in glacial acetic acid in another 96WP. Samples were mixed pipetting up and down and the absorbance was measured at OD480. Growth rates are shown for parental strains SYN2027 and SYN2028 and the corresponding evolved strains in FIG. 51.

### Example 8. Kynurenine Consuming Strains Decrease Tumoral Kynurenine Levels in the CT26 Murine Tumor Model

[1322] The ability of genetically engineered bacteria comprising kynureninase from Pseudomonas fluorescens to consume kynurenine in vivo in the tumor environment was assessed. SYN1704, an E. coli Nissle strain comprising a deletion in Trp:E and a medium copy plasmid expressing kynureninase from Pseudomonas fluorescens under control of a constitutive promoter (Nissle ΔTrpE::CmR+Pconstitutive-Pseudomonas KYNU KanR) was used for in a first study (Study 1).

[1323] In a second study (Study 2) the activity of SYN2028, an E. coli Nissle strain comprising a deletion in Trp:E and an integrated construct expressing kynureninase from Pseudomonas fluorescens under the control of a constitutive promoter (Nissle HA3/4::PSynJ23119-pKYNase KanR TrpE::CmR) was assessed.

[1324] In both studies, CT26 cells obtained from ATCC were cultured according to guidelines provided. Approximately ˜1e6cells/mouse in PBS were implanted subcutaneously into the right flank of each animal (BalbC/J (female, 8 weeks)), and tumor growth was monitored for approximately 10 days. When the tumors reached about ˜100-150 mm3, animals were randomized into groups for dosing.

[1325] For intratumoral injection, bacteria were grown in LB broth until reaching an absorbance at 600 nm (A600 nm) of 0.4 (corresponding to 2×108 colony-forming units (CFU)/mL) and washed twice in PBS. The suspension was diluted in PBS or saline so that 100 microL can be injected at the appropriate doses intratumorally into tumor-bearing mice.

[1326] Study 1:

[1327] Approximately 10 days after CT 26 implantation, bacteria were suspended in 0.1 nil of PBS and mice were injected (5e6 cells/mouse) with 100 ul intratumorally as follows: Group 1-Vehicle Control (n=8), Group 2-SYN94 (n=8), and Group 3-SYN1704 (n=8). From Day 2 until study end, animals were dosed intratumorally biweekly with 100 ul of vehicle control or bacteria at 5e6 cells/mouse. Animals were weighed and the tumor volume measured twice weekly. Animals were euthanized when the tumors reached ˜2000 mm3 and kynurenine concentrations were measured by LC/MS as described herein. Results are shown in FIG. 52A. A significant reduction in intra tumor concentration was observed for the kynurenine consuming strain SYN1704 and for wild type E. coli Nissle. Intratumoral kynurenine levels were reduced in SYN1704, as compared to wild type Nissle, although the difference did not reach significance due to one outlier.

[1328] Study 2:

[1329] Approximately 10 days after CT 26 implantation, bacteria were suspended in 0.1 nil of saline and mice were injected (1e8 cells/mouse) with the bacterial suspension intratumorally as follows: Group 1-Vehicle Control (n=10), Group 2-SYN94 (n=10), Group 3-SYN2028 (n=10). Group 5 (n=10) received INCB024360 (IDO inhibitor) via oral gavage as a control twice daily. From Day 2 until study end, animals were dosed intratumorally biweekly with 100 ul of vehicle control or bacteria at 1e8 cells/mouse. Animals were weighed and the tumor volume measured twice weekly. Group 5 received INCB024360 via oral gavage as a control twice daily until study end Animals were euthanized when the tumors reached ˜2000 mm3 Tumor fragments were placed in pre-weighed bead-buster tubes and store don ice for analysis. Kynurenine concentrations were measured by LC/MS as described herein. Results are shown in FIG. 52B. A significant reduction in intra tumor concentration was observed for the kynurenine consuming strain SYN2028 as compared to wild type Nissle or wild type control. Intratumoral kynurenine levels seen in SYN2028 were similar to those observed for the IDO inhibitor INCB024360.

### Example 9. Comparison of In Vitro Efficacy of Chromosomal Insertion and Plasmid-Bearing Engineered Bacterial Strains

[1330] To compare the in vitro efficacy between engineered bacterial strains harboring a chromosomal insertion of ArgAfbr driven by an fnr inducible promoter at the malEK locus and strains with a low copy plasmid comprising ArgAfbr driven by an fnr inducible promoter, arginine levels in the media were measured at various time points post anaerobic induction. Additionally, to assess whether auxotrophy for thymidine may have an effect on arginine production efficiency, arginine production of engineered bacterial strains with or without a ThyA deletion, comprising the fnr-ArgAfbr on a low copy plasmid or integrated on the chromosome, were compared.

[1331] Overnight cultures were diluted 1:100 in LB and grown with shaking (250 rpm) at 37° C. After 1.5 hrs of growth, the bacteria cultures were induced as follows: (1) bacteria comprising FNR-inducible argA^{fbr} were induced in LB at 37° C. for 4 hrs in anaerobic conditions in a Coy anaerobic chamber (supplying 90% N₂, 5% CO₂, 5% H₂, and 20 mM nitrate) at 37° C.; (2) bacteria comprising tetracycline-inducible argA^{fbr} were induced with anhydrotetracycline (100 ng/mL). After induction, bacteria were removed from the incubator and spun down at maximum speed for 5 min. The cells were resuspended in 1 mL M9 glucose, and the OD₆₀₀ was measured. Cells were diluted until the OD₆₀₀ was between 0.6-0.8. Resuspended cells in M9 glucose media were grown aerobically with shaking at 37 C. 100 μL of the cell resuspension was removed and the OD₆₀₀ is measured at time=0. A 100 μL aliquot was frozen at −20° C. in a round-bottom 96-well plate for mass spectrometry analysis (LC-MS/MS). At each subsequent time point (e.g., 30, 60, and 120 min), 100 μL of the cell suspension was removed and the OD₆₀₀ was measured; a 100 μL aliquot was frozen at −20C in a round-bottom 96-well plate for mass spectrometry analysis. Samples were analyzed for arginine concentrations. At each time point, normalized concentrations as determined by mass spectrometry vs. OD₆₀₀ were used to determine the rate of arginine production per cell per unit time. A summary of the LC-MS/MS method is provided above.

[1332] Arginine production at 30, 60, and 120 min post induction was compared between (1) Syn-UCD301 (SYN-UCD304; comprising 4ArgR and argA^{fbr} expressed under the control of a FNR-inducible promoter integrated into the chromosome at the malEK locus), (2) SYN-UCD205 (comprising ΔArgR and arg^{fbr} expressed under the control of a FNR-inducible promoter on a low-copy plasmid), and (3) SYN-UCD206 (comprising ΔArgR and ΔThyA and argA^{fbr} expressed under the control of a FNR-inducible promoter on a low-copy plasmid. SYN-UCD103 was used as is a control Nissle construct and results are shown.

[1333] Shown herein are the levels of arginine production of SYN-UCD205, SYN-UCD206, and SYN-UCD301 measured at 0, 30, 60, and 120 minutes. Arginine production was comparable between all three strains, with the greatest arginine production seen with SYN-UCD301 at 120 minutes, indicating that chromosomal integration of FNR ArgA fbr results in similar levels of arginine production as seen with the low copy plasmid strains expressing the same construct, and may even slightly increase the rate of arginine production. SYN-UCD206 exhibited attenuated arginine production as compared to SYN-UCD205 and SYN-UCD-301 (lower arginine levels at 60 minutes), but reached comparable arginine production levels at 120 minutes, indicating that ΔThyA may have a slight attenuating effect on arginine production. No arginine production was detected for the SYN-UCD103 control.

[1334] Next, samples were prepared as described above and arginine production at 120 min post induction was compared between (1) SYN-UCD204 (comprising ΔArgR and argA^{fbr} expressed under the control of a tetracycline-inducible promoter on a low-copy plasmid), and (2) SYN-UCD301 (comprising ΔArgR, CmR and argA^{fbr} expressed under the control of a FNR-inducible promoter integrated into the chromosome at the malEK locus), (3) SYN-UCD302 (comprising ΔArgR, ΔThyA, CmR (chloramphenicol resistance) and argAfbr expressed under the control of a FNR-inducible promoter integrated into the chromosome at the malEK locus), and (4) SYN-UCD303 (comprising ΔArgR, ΔThyA, KanR (kanamycin resistance) and argAfbr expressed under the control of a FNR-inducible promoter integrated into the chromosome at the malEK locus).

[1335] SYN-UCD106, comprising ΔArgR and ΔThyA was used as is a control Nissle construct. Results are shown in FIG. 42B. As seen in FIG. 42B, arginine production was elevated to between 0.7 and 0.9 umol/1×10⁹ cells, indicating that arginine production is at similar levels in strains bearing ArgAfbr on a plasmid and strains with integrated copies of ArgAfbr.

### Example 10. Comparison of In Vitro Efficacy of Chromosomal Insertion and Plasmid-Bearing Engineered Bacterial Strains

[1336] The in vitro efficacy (arginine production from ammonia) in an engineered bacterial strain harboring a chromosomal insertion of ArgAfbr driven by an fnr inducible promoter at the malEK locus, with ΔArgR and a ThyA deletion and no antibiotic resistance was assessed (SYN-UCD303).

[1337] Overnight cultures were diluted 1:100 in LB and grown with shaking (250 rpm) at 37° C. After 1.5 hrs of growth, the bacteria cultures were induced in LB at 37° C. for 4 hrs in anaerobic conditions in a Coy anaerobic chamber (supplying 90% N₂, 5% CO₂, 5% H₂, and 20 mM nitrate) at 37° C. After induction, bacteria were removed from the incubator and spun down at maximum speed for 5 min. The cells were resuspended in 1 mL M9 glucose, and the OD₆₀₀ was measured. Cells were diluted until the OD₆₀₀ was between 0.6-0.8. Resuspended cells in M9 glucose media were grown aerobically with shaking at 37 C. 100 μL of the cell resuspension was removed and the OD₆₀₀ is measured at time=0. A 100 μL aliquot was frozen at −20° C. in a round-bottom 96-well plate for mass spectrometry analysis (LC-MS/MS). At each subsequent time point (e.g., 20, 40, 60, 80, 100, and 120 min), 100 μL of the cell suspension was removed and the OD₆₀₀ was measured; a 100 μL aliquot was frozen at −20C in a round-bottom 96-well plate for mass spectrometry analysis. Samples were analyzed for arginine concentrations. At each time point, normalized concentrations as determined by mass spectrometry vs. OD₆₀₀ were used to determine the rate of arginine production per cell per unit time. A summary of the LC-MS/MS method is provided herein. Results are shown in FIG. 43.

### Example 11. Generation of Constructs and Bacteria for Cytokine Secretion

[1338] To produce strains capable of secreting immune modulatory polypeptides, e.g., cytokines, such as hIL-12, mIL-12, hIL-15, GMCSF, TNFα, IFN-gamma, CXCL9 and CXCL10, several constructs were designed employing different secretion strategies. Various cytokine constructs were synthesized, and cloned into vector pBR322 for transformation of E. coli. In some embodiments, the constructs encoding the effector molecules are integrated into the genome. In some embodiments, the constructs encoding the effector molecules are on a plasmid, e.g., a medium copy plasmid.

### Example 12. Activity of Kynurenine Consuming Strain in Combination with Systemic Anti-PD-1 and Anti-CTLA-4 in the MC38 Model

[1339] The ability of the kynurenine consuming strain SYN2028 to augment the anti-tumor response of combined anti-CTLA4 and anti-PD-1 was assessed in the C57BL/6-MC38 syngeneic tumor model.

[1340] To produce cells used in the study, overnight cultures were used to inoculate 500 mL LB medium with antibiotic. The strains were incubated with shaking at 37 C until the culture reached the end of log phase (OD600=0.8-1.0). To harvest, cells were spun down at 5000 rpm for 20 min, media was aspirated, cells were washed with PBS, resuspended in 15% Glycerol and PBS, aliquoted and frozen at −80 C. Cells were concentration tested by serial plating.

[1341] Mice were implanted with MC38 tumors, and mice injected intratumorally with the kynurenine consuming bacteria and intraperitoneally with anti-CTLA-4 and anti-PD-1 antibodies according to the study design in Table 16. MC38 cells were implanted (1×105/mouse/100 μL) SC into the right flank of each animal on day −9. Tumor growth was monitored; when the tumors reached ˜50-80 mm\hat{ }3 on day 1, mice were randomized into treatment groups as shown in Table 16.

[1342] Tumor volumes and body weights were recorded three times in a week with a gap of 1-2 days in between two measurements.

TABLE 16
Study design

| | | Treatment 1 | | | | Treatment 2 | | | | |
|---|---|---|---|---|---|---|---|---|---|---|
| | | Test | | | | Test | | | | Treatment 3 |
| Group | N | Article | Route | Dose | Schedule | Article | Route | Dose | Schedule | Compound |
| 1 | 12 | Anti- | i.p. | 200 ug | Day 1, 4, | Anti- | i.p. | 100 ug | Day 1, 4, | NA |
| | | PD-1 | | | 7 and 10 | CTLA-4 | | | 7 and 10 | |
| | | Isotype | | | | Isotype | | | | |
| | | Control | | | | Control | | | | |
| 2 | 12 | Anti- | i.p. | 200 ug | Day 1, 4, | Anti- | i.p. | 100 ug | Day 1, 4, | NA |
| | | PD-1 | | | 7 and 10 | CTLA-4 | | | 7 and 10 | |
| 3 | 12 | Anti- | i.p. | 200 ug | Day 1, 4, | Anti- | i.p. | 100 ug | Day 1, 4, | SYN094, |
| | | PD-1 | | | 7 and 10 | CTLA-4 | | | 7 and 10 | 5e6 bacteria, |
| | | | | | | | | | | i.t., BIWx2 |
| 4 | 12 | Anti- | i.p. | 200 ug | Day 1, 4, | Anti- | i.p. | 100 ug | Day 1, 4, | SYN2028, |
| | | PD-1 | | | 7 and 10 | CTLA-4 | | | 7 and 10 | 5e6 bacteria, |
| | | | | | | | | | | i.t, BIWx2 |

[1343] Results in FIGS. 58A, 58B, 58C, and 58E show that the kynurenine consuming strain has the ability to improve anti-CTLA-4/anti-PD-1 antibody-mediated anti-tumor activity in the MC38 model. Specifically, in the anti-PD-1/anti-CTLA-4 group, 25% of mice responded to the treatment; same response rate was observed with anti-PD-1/anti-CTLA-4 plus SYN94 group. In the anti-PD-1/anti-CTLA-4 plus SYN2028 group, 71% of mice responded.

### Example 13. Activity of Arginine Producer and Kynurenine Consumer in Combination with Nonmyeloablative Chemotherapy

[1344] The activity of the arginine producer (SYN828) and kynurenine consumer (SYN2028) was assessed in combination with cyclophosphamide treatment in the CT26 tumor model.

[1345] To produce cells for the study, overnight cultures were used to inoculate 500 mL LB medium with antibiotic. The strains were incubated with shaking at 37 C until the culture reached the end of log phase (OD600=0.8-1.0). To harvest, cells were spun down at 5000 rpm for 20 min, media was aspirated, cells were washed with PBS, resuspended in 15% Glycerol and PBS, aliquoted and frozen at −80 C. Cells were concentration tested by serial plating.

[1346] Mice were implanted with CT26 tumors, and mice injected intratumorally with bacteria producing arginine (SYN828) and consuming kynurenine (SYN2028) and controls in combination with cyclophosphamide (CP) at 100 mg/kg, according to the time line described below and in FIG. 44A.

[1347] Briefly, CT26 cells were implanted (1e6 cells/mouse in PBS) SC into the right flank of each animal on day −9. Tumor growth was monitored until the tumors reached ˜50-80 mm\hat{ }3. On day 0, mice were pre-treated with cyclophosphamide at 100 mg/kg (100 uL/mouse) I.P. and randomized into groups. On Day 1 of treatment mice received either SYN94 (WT, 1e8 CFU/mL) (I.T.), SYN2028 (Kyn, 1e8 CFU/mL), or SYN825 (Arg, 1e8 CFU/mL) (I.T.) in 100 uL. On Day 4, 8, 11, and 15, animals were weighed, tumor was measured, and mice were dosed mice with the appropriate treatment/group. Tumor volumes for individual mice are shown in FIGS. 44B, 44C, 44D, 44E, and 44F. and indicate Anti-tumor activity of the kynurenine-consuming and arginine producing strains in combination with cyclophosphamide over cyclophosphamide alone.

### Example 14. Cyclic-Di-AMP Quantitation in Bacterial Cell Pellet and Tumor Tissue Homogenate by LC-MS/MS

[1348] Sample Preparation

[1349] To generate the standards, 10 mg/mL of Cyclic-di-AMP was prepared in 1.5 mL microcentrifuge tubes, and 250, 100, 20, 4, 0.8, 0.16, 0.032 μg/mL solutions were prepared in water. QC solutions were prepared with 200, 20, and 2 μg/mL levels.

[1350] Sample Preparation: for in vitro samples, bacterial pellet was extracted by adding 100 uL of 2:1 acetonitrile:water, and vortexed and centrifuged. 20 μL of supernatant was transferred to a new 96 well plate and diluted tenfold by adding 180 μL 0.1% formic acid. For in vivo sample, tissue homogenates were extracted by adding 90 μL of 2:1 acetonitrile: water to 10 μL tumor homogenate. Samples were vortexed and centrifuged. 20 μL of supernatant was transferred to a new 96 well plate and diluted tenfold by adding 180 μL 0.1% formic acid. Plates were heat-sealed with a ClearASeal sheet and mixed well.

### LC-MS/MS Method

[1351] Analytes were measured by liquid chromatography coupled to tandem mass spectrometry (LC-MS/MS) using a Thermo TSQ Quantum Max triple quadrupole mass spectrometer. Table 17-Table 19 provide the summary of the LC-MS/MS method.

TABLE 17

| | |
|---|---|
| Column: | Thermo Accucore aQ C18 2.6 μm (100 × 2.1 mm) |
| Mobile Phase A: | 100% H2O, 0.1% Formic Acid |
| Mobile Phase B: | 100% ACN, 0.1% Formic Acid |
| Injection volume: | 10 μL |

TABLE 18
HPLC Method

| Time (min) | Flow Rate (μL/min) | A % | B % |
|---|---|---|---|
| 0 | 300 | 100 | 0 |
| 0.5 | 300 | 100 | 0 |
| 1.0 | 300 | 10 | 90 |
| 2.5 | 300 | 10 | 90 |
| 2.51 | 300 | 100 | 0 |
| 4.0 | 300 | 100 | 0 |

TABLE 19
Tandem Mass Spectrometry:

| | |
|---|---|
| Ion Source: | HESI-II |
| Polarity: | Positive |

Analyte SRM transitions:

| | |
|---|---|
| Cyclic-di-AMP: | 659.4 > 329.6 |

[1352] For data analysis, SRM chromatograms were integrated and peak areas of the standards were plotted against concentration. A linear curve was fit and concentrations of the unknowns were calculated using their peak areas and the slope intercept form equation from the standard curve.

### Example 15. Display of Anti-mPD1-scFv on E. coli Nissle Cell Surface

[1353] To generate genetically engineered bacteria which are capable of displaying anti-mPD1-scFv on the Nissle cell surface, constructs were generated according to methods described herein as shown in Table 20. Sequences are SEQ ID NO: 987-989. Display anchor polypeptides include SEQ ID NO: 990-992.

TABLE 20
Strains for display of anti-mPD1-scFv

| Strain | Strain | |
|---|---|---|
| Number | Genotype | Construct |
| SYN2797 | wt Nissle | p15A-Kan-ptet-Invasin-FLAG-J43scFv- |
| | | V5-HIS |
| SYN2798 | wt Nissle | p15A-Kan-ptet-LppOmpA-FLAG-J43scFv- |
| | | V5-HIS |
| SYN2799 | wt Nissle | p15A-Kan-ptet-IntiminN-FLAG-J43scFv- |
| | | V5-HIS |

[1354] In some embodiments, the display anchor is at least about 80%, at least about 85%, at least about 90%, at least about 95%, or at least about 99% homologous to the sequence of SEQ ID NO: 990, SEQ ID NO: 991, and/or SEQ ID NO: 992.

[1355] E. coli Nissle comprising a plasmid based construct comprising tet-inducible ptet-LppOmpA-anti-PD1-scFv was grown overnight in LB medium. Cultures were diluted 1:100 in LB and grown shaking (200 rpm) to an optical density of 0.8 at which time culture was cooled down to room temperature and anhydrous tetracycline (ATC) was added to cultures at a concentration of 100 ng/mL to induce expression of ptet-LppOmpA-J43-scFv for 18 hours.

[1356] To determine whether the single-chain antibody was displayed on the surface of the genetically engineered E. coli Nissle and functionally binds to PD1 a whole cell ELISA assay was performed. 10\hat{ }9 cells were blocked using PBS with 2% BSA for 1 h at room temperature and biotinylated-mPD1 was added and incubated for 1 h at room temperature. Afterwards, cells were washed 3 times with PBST (PBS/0.1% Tween-20) and incubated with a streptavidin conjugated HRP in blocking solution for 40 min. Following incubation, wells were washed 3 times with PBST and resuspended in PBS, then stained using a 3,3′,5,5′-tetramethylbenzidine (TMB) substrate kit per the manufacturer's instructions (Thermofisher). Biotinylated IgG and plain PBS were used instead of mPD1 as negative controls. Cells were removed by centrifugation and supernatants were collected. Signal intensities of supernatant were measured using an ELISA reader at 450 nm. Results (data not available) indicate that the J43-scFv (anti-mPD1) is displayed on the surface of the genetically engineered bacteria and can bind to mPD1 (Table 21).

TABLE 21
Nissle Surface Display ELISA Assay

| | | Primary | Secondary |
|---|---|---|---|
| Strain | OD450 | antibody | antibody |
| SYN2798 (p15A-ptet-LppOmpA-anti- | 0.125 | PBS only | Strp-HRP |
| PD1-scFv) | | | |
| SYN2798 (p15A-ptet-LppOmpA-anti- | 0.133 | mIgG-strp | Strp-HRP |
| PD1-scFv) | | | |
| SYN2798 (p15A-ptet-LppOmpA-anti- | 0.421 | mPD1-strp | Strp-HRP |
| PD1-scFv) | | | |

### Example 16. α-PD1-scFv Expression in E. coli

[1357] To determine whether a functional scFv can be expressed in E. coli, an anti-PD1-scFv fragment was generated based on J43 monoclonal antibody, which reacts with mouse PD-1.

[1358] Mouse monoclonal antibody J43 sequence was obtained from patent EP 1445264 A1. Next, the single-chain variable fragment (scFv) was designed. A fragment containing tet promoter, a ribosome binding site, the designed J43-scFv, a C terminal V5 tag and a C terminal hexa-histidine tag (SEQ ID NO: 1252) was synthesized by IDTDNA. The construct was cloned into the pCR™-Blunt II-TOPO® Vector (Invitrogen) and transformed into E. coli DH5a as described herein to generate the plasmid pUC-ptet-J43scFv-V5-HIS (SEQ ID NO: 976-980).

[1359] E. coli comprising either tet-inducible J43-Anti-PD1-scFv-V5 or wild type controls were grown overnight in LB medium. Cultures were diluted 1:40 in LB and grown shaking (250 rpm) to an optical density of 0.8 at which time anhydrous tetracycline (ATC) was added to cultures at a concentration of 100 ng/mL to induce expression of J43-Anti-PD1-scFv-V5. Same amount of tetracycline was added to wild type control cultures. After 4 hrs of induction, bacteria were pelleted, washed in PBS, and harvested, resuspended in 2 mL sonication buffer (PBS), and lysed by sonication on ice. Insoluble debris was spun down twice for 15 min at 12,000 rpm at 4° C.

[1360] Protein concentration was determined by BCA protein assay, and isolated extracts from wild type and strains comprising the Ptet-J43-Anti-PD1-scFV-V5 were analyzed by Western blot. Proteins were transferred onto PVDF membranes and J43-Anti-PD1-scFv was detected with an HRP-conjugated anti-V5 antibody (Biolegend). A single band was detected at 27 kDa in lane 2 (extract from J43-Anti-PD1-scFv-V5 strain). No bands were detected in lane 1 (wild type extract).

[1361] To determine whether the single-chain antibody purified from E. coli DH5a functionally binds to the target protein, PD1, an ELISA assay was performed. Plates were absorbed overnight at 4° C. with 100 μL of 2 μg/mL per well of PD1 (Rndsystems). Wells were blocked with 2% BSA in PBS/0.1% Tween-20 for 2 hours at room temperature. After three washes, wells were incubated with bacterial extracts (J43-scFv-V5 or wild type-neg-ctrl) for 1 hour at room temperature. Wells were washed 4 times with PBST (PBS/0.1% Tween-20) and incubated with a HRP-conjugated anti-V5 antibody (Biolegend) in blocking solution for 40 min. Following incubation, wells were washed 4 times with PBST and then stained using a 3,3′,5,5′-tetramethylbenzidine (TMB). Signal intensities were measured using an ELISA reader at 450 nm. Results are shown in Table 22 and indicate that the antibody expressed by the genetically engineered bacteria can bind to PD1 specifically.

TABLE 22
ELISA Binding Assay

| 1′ | PBS | mPD1 | IgG | 2′ |
|---|---|---|---|---|
| antibody | coating | coating | coating | antibody |
| Wild type-neg-ctrl | 0.11 | 0.13 | 0.12 | α-V5-HRP |
| J43-scFv-V5 | 0.11 | 1.41 | 0.13 | α-V5-HRP |
| Wild type-neg-ctrl (1/2) | 0.10 | 0.09 | 0.10 | α-V5-HRP |
| J43-scFv-V5 (1/2) | 0.10 | 0.90 | 0.11 | α-V5-HRP |

[1362] Next, recombinant J43-Anti-scFv-V5 was expression using pET22b vector harvesting a C-terminal poly-histidine tag and purified using immobilized metal ion affinity chromatography. Protein concentration was determined by absorption at 280 nm and purity was confirmed by Coomassie gel (data not shown).

[1363] To determine whether anti-PD1-scFv expressed in E. coli binds to surface PD1 on mouse EL4 cells, flow cytometric analysis was performed using EL4 cells. EL4 are a mouse lymphoma cell line which expresses PD1 on its cell surface.

[1364] EL4 cells were grown in Dulbecco's Modified Eagle's Medium (DMEM) with 10% FBS. Cells were spun down, supernatant was aspirated, pellet was resuspended in 1 nil D-PBS, transferred into chilled assay tubes (1×106 cells), and washed 2-3 times in D-PBS with 0.5% BSA. Cells were resuspended in PBS with 0.5% BSA, to which the purified scFv-V5 and anti-V5-FITC antibody were added and incubated for 1 hour at room temperature. Negative control left out scFv-V5. Cells were resuspended in 0.5 ml PBS and analyzed on a flow cytometer. Results are shown in FIG. 62. A population shift is observed only when the purified anti-PD1-scFv-V5 and anti-V5-FITC were both present (two different batches were shown), relative to samples with EL4 alone and EL4 plus secondary antibody only.

### Example 17. Secretion of Anti-mPD1-scFv

[1365] Strains generated according to methods described herein for secretion of anti-mPD1-scFv are shown in Table 24.

TABLE 23
Strains for secretion of anti-mPD1-scFv

| Strain Number | Genotype | Construct |
|---|---|---|
| SYN2790 | Nissle Δ nlpI::CmR | pUC-ptet-OmpF-FLAG- |
| SYN2767 | Nissle Δ tolA::CmR | pUC-ptet-OmpF-FLAG- |
| SYN2768 | Nissle Δ PAL::CmR | pUC-ptet-OmpF-FLAG- |
| SYN2769 | Nissle Δ lpp::CmR | pUC-ptet-OmpF-FLAG- |
| SYN2770 | Nissle Δ nlpI::CmR | pUC-ptet-PhoA-FLAG- |
| SYN2771 | Nissle Δ tolA::CmR | pUC-ptet-PhoA-FLAG- |
| SYN2772 | Nissle Δ PAL::CmR | pUC-ptet-PhoA-FLAG- |
| SYN2773 | Nissle Δ lpp::CmR | pUC-ptet-PhoA-FLAG- |
| SYN2774 | Nissle Δ nlpI::CmR | pUC-ptet-PelB-FLAG- |
| SYN2775 | Nissle Δ tolA::CmR | pUC-ptet-PelB-FLAG- |
| SYN2776 | Nissle Δ PAL::CmR | pUC-ptet-PelB-FLAG- |
| SYN2777 | Nissle Δ lpp::CmR | pUC-ptet-PelB-FLAG- |

[1366] E. coli Nissle comprising plasmid based construct comprising tet-inducible J43-Anti-scFv-V5 with PhoA, OmpF or PelB secretion tags (see SEQ ID NOs: 981-986) or wild type control were grown overnight in LB medium. Cultures were diluted 1:100 in LB and grown shaking (200 rpm) to an optical density of 0.8 at which time cultures were cooled down to room temperature and anhydrous tetracycline (ATC) was added to cultures at a concentration of 100 ng/mL to induce expression of PhoA-, OmpF- or PelB-J43-Anti-scFv-V5. No tetracycline was added to wild type Nissle cultures. After 18 hrs of induction at room temperature, bacteria were pelleted, and the supernatant was collected and placed on ice.

[1367] Protein concentration in the medium and the cell lysates was determined by BCA protein assay, and isolated extracts and media from wild type and strains comprising the Ptet-J43-anti-scFv-V5 were analyzed by Western blot. Proteins were transferred onto PVDF membranes and J43-anti-scFv detected with an HRP-conjugated anti-V5 antibody (Biolegend). Results are shown in FIG. 63. A single band was detected around 34 kDa in lane 1-6 corresponding to extracts from SYN2767, SYN2769, SYN2771, SYN2773, SYN2775 and SYN2777 respectively.

[1368] To determine whether the secreted J43-anti-scFv in E. coli Nissle binds to PD1 on mouse cells, flow cytometric analysis was performed using EL4 cells. EL4 are a mouse lymphoma cell line which expresses PD1 on its cell surface.

[1369] EL4 cells were grown in Dulbecco's Modified Eagle's Medium (DMEM) with 10% FBS and 1% Penicillin-Streptomycin Cells were spun down, supernatant was aspirated, pellet was resuspended in 1 ml D-PBS, transferred into chilled assay tubes (1×10\hat{ }6 cells), and washed 3 times in D-PBS. Cells were resuspended in D-PBS with 0.5% BSA, to which the purified scFv-V5 and anti-V5-FITC antibody were added and incubated for 1 hour at room temperature. Negative control left out secreted J43-scFv-V5. Cells were then resuspended in 0.5 ml PBS and analyzed on a flow cytometer. Results are shown in (FIG. 64). A population shift is observed only when the secreted anti-PD1-scFv-V5 (1′ antibody) and anti-V5-FITC (2′ antibody) were both present, relative to samples with EL4 alone and EL4 plus secondary antibody only. A similar study was conducted with different amounts of the secreted scFv (0, 2, 5, and 15 tit), and a dose-dependent staining of the EL4 cells was observed (FIG. 65).

[1370] Next, a competition assay was conducted to determine whether PDL1 could inhibit the binding of the anti-PD1-scFv secreted by the genetically engineered bacteria from binding to murine PD1. EL4 cells were grown and flow cytometry protocol was conducted essentially as described above except that PDL1 was added at various concentrations (0, 5, 10, and 30 mg/mL) during the incubation of the secreted anti-PD1-scFv-V5. Rat-IgG was used as a negative control of secreted scFv. Results are shown in FIG. 66A and FIG. 66B. PDL1 competed in a dose dependent manner against the binding of secreted anti-mPD1-scFv to mPD1 on the surface of EL4 cells. Negative control of Rat-IgG protein did not show similar dose dependent binding competition.

### Example 18. Cytokine Secretion (IL-15)

[1371] To determine whether the hIL-15 expressed by engineered bacteria is secreted, the concentration of hIL-15 in the bacterial supernatant from engineered strains comprising hIL-15 secretion constructs/strains was measured. The strains comprise either a deletion in Lpp (lpp::Cm), nlpl (nlpL::Cm), tolA (tolA::Cm), or PAL (PAL::Cm). All strains further comprise a plasmid expressing hIL-15 with a PhoA secretion tag.

[1372] E. coli Nissle strains were grown overnight in LB medium. Cultures were diluted 1:200 in LB and grown shaking (200 rpm) for 2 hours. Cultures were diluted to an optical density of 0.5 at which time anhydrous tetracycline (ATC) was added to cultures at a concentration of 100 ng/mL to induce expression of hIL-15. After 12 hours of induction, cells were spun down, and supernatant was collected. To generate cell free medium, the clarified supernatant was further filtered through a 0.22 micron filter to remove any remaining bacteria and placed on ice. Additionally, to detect intracellular recombinant protein production, pelleted were bacteria washed and resuspended in BugBuster™ (Millipore) with protease inhibitors and Ready-Lyse Lysozyme Solution (Epicenter), resulting in lysate concentrated 10-fold compared to original culture conditions. After incubation at room temperature for 10 minutes insoluble debris is spun down at 20 min at 12,000 ref at 4.0 then placed on ice until further processing.

[1373] The concentration of hIL-15 in the cell-free medium and in the bacterial cell extract was measured by hIL-15 ELISA (RnD Systems, Minneapolis, Minn.), according to manufacturer's instructions. All samples were run in triplicate, and a standard curve was used to calculate secreted levels of hIL-15. Standard curves were generated using recombinant hIL-15. Wild type Nissle was included in the ELISA as a negative control, and no signal was observed. Table 24 summarizes levels of hIL-15 measured in the respective supernatants. The data show that hIL-15 is secreted at various levels from the different bacterial strains.

TABLE 24
Concentration of Secreted hIL-15

| | | | [IL-15] (ng/ml) |
|---|---|---|---|
| ID | Genotype | Construct | in the medium |
| SYN1817 | Lpp (lpp::Cm) | pBR322.Ptet.phoA-IL15 | 27.9 |
| SYN1818 | nlpI (nlpI::Cm) | pBR322.Ptet.phoA-IL15 | 30.4 |
| SYN1819 | tolA (tolA::Cm) | pBR322.Ptet.phoA-IL15 | 33.8 |
| SYN1820 | PAL (PAL::Cm) | pBR322.Ptet.phoA-IL15 | 38.0 |

### Example 19. Cytokine Secretion (GMCSF)

[1374] To determine whether hGMCSF expressed by engineered bacteria is secreted, the concentration of hGMCSF in the bacterial supernatant from engineered strains comprising hGMCSF secretion constructs/strains was measured. The strains comprise either a deletion in Lpp (lpp::Cm), nlpl (nipL::Cm), tolA (tolA::Cm), or PAL (PAL::Cm). All strains further comprise a plasmid expressing hGMCSF with a PhoA secretion tag.

[1375] E. coli Nissle strains were grown, induced and processed as described in the previous example for IL-15.

[1376] The concentration of hGMCSF in the cell-free medium and in the bacterial cell extract was measured by hGMCSF ELISA (RnD Systems, Minneapolis, Minn.), according to manufacturer's instructions. All samples were run in triplicate, and a standard curve was used to calculate secreted levels of hGMCSF. Standard curves were generated using recombinant hGMCSF. Wild type Nissle was included in the ELISA as a negative control, and no signal was observed. Table 25 summarizes levels of hGMCSF measured in the respective supernatants. The data show that hGMCSF is secreted at various levels from the different bacterial strains.

TABLE 25
Concentration of Secreted GMCSF

| | | | | [GMCSF] (ng/ml) | [GMCSF] (ng/ml) |
|---|---|---|---|---|---|
| | | | | in the medium | in the medium |
| ID | Genotype | High copy construct | Low copy construct | High copy plasmid | Low copy plasmid |
| SYN094 | WT | None | None | 0.0 | 0.0 |
| SYN2036/ | lpp | pUC.Ptet.phoA- | pUN UNSX-TetR-Ptet- | 45.8 | 44.7 |
| SYN2093 | | GMCSF | phoA-GMCSF-UNS9 | | |
| SYN2038/ | PAL | pUC.Ptet.phoA- | pUN UNSX-TetR-Ptet- | 114.3 | 98.8 |
| SYN2103 | | GMCSF | phoA-GMCSF-UNS9 | | |
| SYN2037/ | nlpI | pUC.Ptet.phoA- | pUN UNSX-TetR-Ptet- | 39.9 | 44.0 |
| SYN2095 | | GMCSF | phoA-GMCSF-UNS9 | | |

### Example 20. Cytokine Secretion (TNFa)

[1377] To determine whether hTNFa expressed by engineered bacteria is secreted, the concentration of hTNFa in the bacterial supernatant from engineered strains comprising hTNFa secretion constructs/strains was measured. The strains comprise either a deletion in Lpp (lpp::Cm), nlpI (nlpL::Cm), tolA (tolA::Cm), or PAL (PAL::Cm). All strains further comprise a plasmid expressing hTNFa with a PhoA secretion tag.

[1378] E. coli Nissle strains were grown, induced and processed as described in the previous example for IL-15.

[1379] The concentration of hTNFa in the cell-free medium and in the bacterial cell extract was measured by hTNFa ELISA (RnD Systems, Minneapolis, Minn.), according to manufacturer's instructions. All samples were run in triplicate, and a standard curve was used to calculate secreted levels of hTNFa. Standard curves were generated using recombinant hTNFa. Wild type Nissle was included in the ELISA as a negative control, and no signal was observed. Table 26 summarizes levels of hTNFa measured in the respective supernatants. The data show that hTNFa is secreted at various levels from the different bacterial strains.

TABLE 26
Concentration of Secreted TNFa

| | | | Secreted |
|---|---|---|---|
| Strain | Genotype | Construct | [TNFa] ng/mL |
| SYN094 | WT | None | 0 |
| SYN2541 | lpp::Cm | Nissle Ptet-phoA- | 129.6 |
| | | TNFa | |
| SYN2542 | nlpI::Cm | Nissle Ptet-phoA- | 345.3 |
| | | TNFa | |
| SYN2543/ | PAL::Cm | Nissle Ptet-phoA- | >400 |
| SYN2304 | | TNFa | |
| SYN2544 | TrpE PAL::Cm | HA3/4::Plpp- | >400 |
| | | pKYNase Ptet-phoA- | |
| | | TNFa | |
| SYN2545 | TrpE PAL::Cm | HA3/4::PSyn- | >400 |
| | | pKYNase Ptet-phoA- | |
| | | TNFa | |

### Example 21. Functional Assay for Secreted TNFα

[1380] Next, studies were conducted to demonstrate that TNFα secreted from genetically engineered bacteria is functional. A cell-based assay was employ based on TNFα mediated NF-kappaB activation. TNFα binding to its receptor binding results in phosphorylation and degradation of IkBalpha by IKK. Bioactivity of TNFα can be determined by quantification of IkB degradation via flow cytometry.

[1381] Briefly, HeLa cells were treated with TNFα secreting supernatants derived from SYN2304 (comprising PAL::Cm p15a TetR Ptet-phoA TNFα) for 10 min. Cells were then fixed in paraformaldehyde based buffer followed by permeabilization in Triton X-100. Modulation of IkBa degradation determined by flow cytometry, and results are shown in FIG. 37.

[1382] As seen in FIG. 37, SYN2304 exhibits bioactivity approaching that of rhTNFa, and SYN1557 treatment does not result in measurable signal indicating no confounds from off target components of bacterial supernatants (ie LPS).

### Example 22. Cytokine Secretion (hIFNg)

[1383] To determine whether hIFNg expressed by engineered bacteria is secreted, the concentration of hIFNg in the bacterial supernatant from engineered strains comprising hTNFa secretion constructs/strains was measured. The strains comprise either a deletion in Lpp (lpp::Cm), nlpI (nlpI::Cm), tolA (tolA::Cm), or PAL (PAL::Cm). All strains further comprise a plasmid expressing hIFNg with a PhoA secretion tag.

[1384] E. coli Nissle strains were grown, induced and processed as described in the previous example for IL-15.

[1385] The concentration of hIFNg in the cell-free medium and in the bacterial cell extract was measured by hIFNg ELISA (RnD Systems, Minneapolis, Minn.), according to manufacturer's instructions. All samples were run in triplicate, and a standard curve was used to calculate secreted levels of hIFNg. Standard curves were generated using recombinant hIFNg. Wild type Nissle was included in the ELISA as a negative control, and no signal was observed. Table 27 summarizes levels of hIFNg measured in the respective supernatants. The data show that hIFNg is secreted at various levels from the different bacterial strains.

TABLE 27
Concentration of Secreted IFNg

| | | | Secreted |
|---|---|---|---|
| Strain | Genotype | Construct | [IFNg] ng/mL |
| SYN094 | WT | None | 0 |
| SYN2546 | lpp::Cm | Nissle Ptet-phoA-IFNg | 44.9 |
| SYN2547 | nlpI::Cm | Nissle Ptet-phoA-IFNg | 51.5 |
| SYN2548 | PAL::Cm | Nissle Ptet-phoA-IFNg | 85.9 |
| SYN2549 | TrpE PAL::Cm | HA3/4::Plpp-pKYNase | 39.1 |
| | | Ptet-phoA-IFNg | |
| SYN2550 | TrpE PAL::Cm | HA3/4::PSyn-pKYNase | 87.6 |
| | | Ptet-phoA-IFNg | |

[1386] Table 28 provides a summary of the levels of secretion obtained for each cytokine, and lists some structural features of the cytokine which may explain some of the differences in secretion levels observed.

TABLE 28
Summary of Secretion Results

| | | | | | | Secretion |
|---|---|---|---|---|---|---|
| | Size | | O-linked | N-linked | Disulphide | level |
| Therapeutic | (Dal) | Stoichiometry | Glycosylation | Glycosylation | Bonds | (ng/mL) |
| hIL-15 | 14715 | Monomer | 0 | 1 | 2 | 38.0 |
| GMCSF | 14477 | Monomer | 4 | 2 | 2 | 114.0 |
| TNFα | 17353 | Monomer | 1 | 0 | 1 | >400 |
| IFN-gamma | 16177 | Homodimer | 0 | 2 | 0 | 87.6 |

### Example 23. Anti-CD47 scFv Expression in E. coli

[1387] To determine whether a functional anti-CD47-scFv can be expressed in E. coli, an anti-CD47-scFv fragment was generated based on B6H12 and 5F9 monoclonal antibodies, which reacts with human CD47.

[1388] Monoclonal antibody B6H12 and 5F9 (anti human CD47) sequences were obtained from published patent (US 20130142786 A1). Next, the single-chain variable fragment (scFv) targeting human CD47 was designed. A fragment containing tet promoter, a ribosome binding site, the designed antihCD47-scFv, a C terminal V5 tag and a C terminal hexa-histidine tag (SEQ ID NO: 1252) was synthesized by IDTDNA. The construct was cloned into the pCR™-Blunt II-TOPO® Vector (Invitrogen) and transformed into E. coli DH5a as described herein to generate the plasmid pUC-ptet-B6H12antihCD47scFv-V5-HIS (SEQ ID NO: 993) and pUC-ptet-5F9antihCD47scFv-V5-HIS (SEQ ID NO: 994).

[1389] E. coli DH5a comprising pUC-ptet-B6H12antihCD47scFv-V5-HIS or pUC-ptet-5F9antihCD47scFv-V5-HIS were grown overnight in LB medium. Cultures were diluted 1:100 in LB and grown shaking (200 rpm) to an optical density of 0.8 at which time cultures were cooled down to room temperature and anhydrous tetracycline (ATC) was added to cultures at a concentration of 100 ng/mL to induce expression of ptet-scFv for 18 hours and then bacteria were pelleted, washed in PBS, and harvested, resuspended in 2 mL PBS buffer and lysed by sonication on ice. Insoluble debris is spun down twice for 15 min at 12,000 rpm at 4.C.

[1390] To determine whether the anti CD47 single-chain antibody expressed in E. coli DH5a functionally binds to the target protein, an ELISA assay was performed. Plates were absorbed overnight at 4° C. with 100 μL of 2 μg/mL per well of target proteins (humanCD47, mouseCD47, IgG and PBS, from Rndsystems). Wells were blocked with 2% BSA in PBS/0.1% Tween-20 for 2 hours at room temperature. After three washes, wells were incubated with bacterial extracts for 1 hour at room temperature. Wells were washed 4times with PBST (PBS/0.1% Tween-20) and incubated with a HRP-conjugated anti-V5 antibody(Biolegend) in blocking solution for 40 min. Following incubation, wells were washed 4 times with PBST and then stained using a 3,3′,5,5′-tetramethylbenzidine (TMB). Signal intensities were measured using an ELISA reader at 450 nm. Results are shown in Table 29 and indicate that the antiCD47-scFv expressed by the genetically engineered bacteria can bind to humanCD47 specifically.

TABLE 29
ELISA Binding Assay

| | | Primary | Secondary | |
|---|---|---|---|---|
| Strain | Coating | antibody | antibody | OD450 |
| SYN2936 (pUC-Ptet- | PBS | B6H12-scFv | Anti-V5-HRP | 0.047 |
| B6H12scFv-V5-HIS) | | extracts | | |
| SYN2936 (pUC-Ptet- | IgG | B6H12-scFv | Anti-V5-HRP | 0.064 |
| B6H12scFv-V5-HIS) | | extracts | | |
| SYN2936 (pUC-Ptet- | hCD47 | B6H12-scFv | Anti-V5-HRP | 1.587 |
| B6H12scFv-V5-HIS) | | extracts | | |
| SYN2936 (pUC-Ptet- | mCD47 | B6H12-scFv | Anti-V5-HRP | 0.053 |
| B6H12scFv-V5-HIS) | | extracts | | |
| SYN2937 (pUC-Ptet- | PBS | 5F9-scFv | Anti-V5-HRP | 0.048 |
| 5F9scFv-V5-HIS) | | extracts | | |
| SYN2937 (pUC-Ptet- | IgG | 5F9-scFv | Anti-V5-HRP | 0.057 |
| 5F9scFv-V5-HIS) | | extracts | | |
| SYN2937 (pUC-Ptet- | hCD47 | 5F9-scFv | Anti-V5-HRP | 1.838 |
| 5F9scFv-V5-HIS) | | extracts | | |
| SYN2937 (pUC-Ptet- | mCD47 | 5F9-scFv | Anti-V5-HRP | 0.053 |
| 5F9scFv-V5-HIS) | | extracts | | |

### Example 24. Kynurenine Consuming Strains Decrease Tumoral Kynurenine Levels in the CT26 Murine Tumor Model

[1391] The ability of genetically engineered bacteria comprising kynureninase from Pseudomonas fluorescens to consume kynurenine in vivo in the tumor environment was assessed. SYN1704, an E. coli Nissle strain comprising a deletion in Trp:E and a medium copy plasmid expressing kynureninase from Pseudomonas fluorescens under control of a constitutive promoter (Nissle deltaTrpE::CmR+Pconstitutive-Pseudomonas KYNU KanR) was used.

[1392] In both studies, CT26 cells obtained from ATCC were cultured according to guidelines provided. Approximately ˜1e6 cells/mouse in PBS were implanted subcutaneously into the right flank of each animal (BalbC/J (female, 8 weeks)), and tumor growth was monitored for approximately 10 days. When the tumors reached about ˜100-150 mm³, animals were randomized into groups for dosing.

[1393] For intratumoral injection, bacteria were grown in LB broth until reaching an absorbance at 600 nm (A600 nm) of 0.4 (corresponding to 2×10⁸ colony-forming units (CFU)/mL) and washed twice in PBS. The suspension was diluted in PBS or saline so that 100 uL can be injected at the appropriate doses intratumorally into tumor-bearing mice.

[1394] Approximately 10 days after CT 26 implantation, bacteria were suspended in 0.1 mL of PBS and mice were injected (1e7 cells/mouse) with 100 uL intratumorally as follows: Group 1-Saline Control (n=7), Group 2-SYN1704 (n=7), Animals were dosed bi-weekly (BIW) according to their grouping either with saline or with the strains intratumorally (IT) Animals were weighed and the tumor volume measured twice weekly. Animals were euthanized when the tumors reached ˜2000 mm³. Plasma and tumor tissue were harvested and kynurenine and tryptophan concentrations were measured by LC/MS as described herein. Results are shown in FIGS. 42A and 42B. A significant reduction in intratumoral (P<0.001) and plasma (P<0.005) concentration of kynurenine was observed for the kynurenine consuming strain SYN1704. Tryptophan levels remained constant (data not shown).

### Example 25. Kinetic Study with SYN94 and SYN1704 in a CT26 Tumor Model

[1395] The effects of single administration of a KYN-consuming strain in CT26 tumors has on tumoral KYN levels and tumor weight was assessed. Female Balb/C mice (18-25 g) from CRL at 8wks of age were allowed to acclimate to facility for at least 3 days Animals were being placed on regular food and water.

[1396] On day −8, CT26 cells (˜1e6 cells/mouse in PBS) were implanted SC into right flank of each animal. Tumor growth was monitored for one week until tumors reached ˜100-150 mm3 Animals were then weighed, measured and randomized into treatment groups according to Table 30 (Day 1) Animals were dosed with SYN94 or SYN1704 at the appropriate concentration via intratumoral dosing. For intratumoral injection, SYN94 cells were diluted from a 3.0×10e11 CFU/mL stock to a concentration of 1×10e8 CFU/mL and SYN1704 cells were diluted from a stock to a concentration of 1×10e8 CFU/mL.

TABLE 30
Study Design

| | Number of | | | | | |
|---|---|---|---|---|---|---|
| Group | animals/ | Test | Concen- | Dose | | Dose |
| Number | sex | Article | tration | Volume | Media | Route |
| 1 | 4/F | None | None | 100 μL | None | None |
| 2 | 4/F | SYN94 | 1e8 CFU/mL | 100 μL | PBS | IT |
| 3 | 4/F | SYN94 | 1e8 CFU/mL | 100 μL | PBS | IT |
| 4 | 4/F | SYN94 | 1e8 CFU/mL | 100 μL | PBS | IT |
| 5 | 4/F | SYN1704 | 1e8 CFU/mL | 100 μL | PBS | IT |
| 6 | 4/F | SYN1704 | 1e8 CFU/mL | 100 μL | PBS | IT |
| 7 | 4/F | SYN1704 | 1e8 CFU/mL | 100 μL | PBS | IT |

[1397] Animals were observed daily after dosing for signs of abnormalities or excessive pain associated with tumor growth. Animals were sacrificed on day 1 (T=0 group; Group 1), day 2 (T=24h; Groups 2&5). day 4 (T=72h; Groups 3&6), and day 8 (T=168h; Groups 4&7).

[1398] Whole blood was collected for each group via cardiac bleed at appropriate endpoint. Maximum obtainable of blood was collected into LiHep tubes (BD). Samples were kept on ice until they were spun in a centrifuge (2000 g for 10 min at 4C). Plasma was then transferred into 1.5 mL Eppendorf tubes and stored at −80 C until later analysis. Tumor samples were split into two parts, and the first part was collected at appropriate endpoint in reweighed bead buster tubes. Tissues were weighed in tubes before being stored at −80 C for further analysis. The other part of the tumor was fixed in 10% formalin for sectioning and analysis. Plasma samples from blood collection were analyzed by LCMS and cytokine analysis was conducted using cell based assays. Tumor samples were analyzed by LCMS for kynurenine levels. Results are shown in FIGS. 54A-54C.

### Example 26. Secretion of Murine CD40L

[1399] To generate genetically engineered bacteria which are capable of secreting CD40L, mCD40L1(47-260) and mCD40L2(122-260) constructs as shown in Table 89 were generated according to methods described herein. mCD40L1(47-260) and mCD40L2(122-260) correspond to extracellular portion of the full length mCD40L and soluble form of mCD4L, respectively.

TABLE 31
Strains for secretion of murine CD40L

| Strain | | |
|---|---|---|
| Number | Genotype | Construct |
| SYN1557 | Nissle ΔPAL::CmR | — |
| (parental | | |
| strain) | | |
| SYN3366 | Nissle ΔPAL::CmR | pUC-ptet-phoA-mCD40L1 |
| | | (47-260) -V5-HIS |
| SYN3367 | Nissle ΔPAL::CmR | pUC- ptet-phoA-mCD40L2 |
| | | (112-260) -V5-HIS |

[1400] E. coli Nissle comprising plasmid-based tet-inducible constructs comprising ptet-PhoA-CD40L1 (47-260) (SYN3366) and tet-PhoA-CD40L2 (112-260) (SYN3367) and the parental control strain SYN1557 were grown overnight in LB medium. Cultures were diluted 1:100 in LB and grown shaking (200 rpm) to an optical density of 0.8, at which time the cultures were cooled down to room temperature and anhydrous tetracycline (ATC) was added to cultures at a concentration of 100 ng/mL, to induce expression of mCD40L1 and mCD40L2.

[1401] After 18 hours of induction, cells were spun down, and supernatant was collected. To generate cell free medium, the clarified supernatant was further filtered through a 0.22 micron filter to remove any remaining bacteria and placed on ice.

[1402] Supernatants were then analyzed by western blot. Proteins from 25 μL supernatant were transferred onto PVDF membranes and mCD40-L1 and mCD40L-2 were detected with an HRP-conjugated anti-V5 antibody (Biolegend). Results are shown in FIG. 55. A single band was detected around 32 kDa and 24 kDa for mCD40L1 and mCD40L2, respectively.

[1403] To determine whether the mCD40L secreted by the genetically engineered E. coli Nissle captured in the clarified supernatant can functionally bind to mCD40 and/or is detected by an anti-mCD40L antibody, an ELISA assay was performed by coating the plate with mCD40 or anti-mCD40L antibody. Results are shown in Table 32 and indicate that mCD40L1 (47-260) and mCD40L2 (112-260) secreted by the genetically engineered bacteria and can bind to mCD40.

TABLE 32
CD40 ELISA Binding Assay

| | Coating Materials | | | |
|---|---|---|---|---|
| Samples | mCD40 | Anti-mCD40L | IgG | PBS |
| PBS | 0.051 | 0.063 | 0.049 | 0.047 |
| Control | 0.054 | 0.065 | 0.052 | 0.054 |
| Secreted CD40-L1 | 0.231 | 0.394 | 0.052 | 0.049 |
| Secreted CD40-L2 | 0.639 | 0.825 | 0.052 | 0.05 |

### Example 27. Secretion of SIRPα and Variants and Anti-CD47 scFv

[1404] To generate genetically engineered bacteria which are capable of secreting anti-SIRPA, constructs shown in Table 33 were generated according to methods described herein. Sequences are shown include SEQ ID NOs: 1094-1104 and SEQ ID NOs: 1105-1121.

TABLE 33
Strains for secretion of SIRPα, SIRPα
variants and mCD47 scFv Ligand

| Strain | | |
|---|---|---|
| Number | Genotype | Construct |
| SYN1557 | Nissle ΔPAL::CmR | — |
| (parental | | |
| strain) | | |
| SYN2996 | Nissle ΔPAL::CmR | p15A-ptet-PhoA-FLAG-mSIRPa(32- |
| | | 373)-V5-HIS |
| SYN3159 | Nissle ΔPAL::CmR | pUC-ptet-PhoA-FLAG-CV1sirpα- |
| | | V5-HIS |
| SYN3160 | Nissle ΔPAL::CmR | pUC-ptet-PhoA-FLAG-FD6x2sirpα- |
| | | V5-HIS |
| SYN3021 | Nissle ΔPAL::CmR | pUC-ptet-PhoA-SIRPαCV1hIgG4- |
| | | V5-HIS |
| SYN3020 | Nissle ΔPAL::CmR | pUC-ptet-PhoA-FD6sirpαhIgG4- |
| | | V5-HIS |
| SYN3161 | Nissle ΔPAL::CmR | pUC-tet-PhoA-αmCD47scFv-V5-HIS |

[1405] E. coli Nissle strains SYN1557, SYN2996, SYN3159, SYN3160, SYN3021, SYN3020, and SYN3161, were grown overnight in LB medium. Cultures were diluted 1:100 in LB and grown shaking (200 rpm) to an optical density of 0.8 at which time culture was cooled down to room temperature and anhydrous tetracycline (ATC) was added to cultures at a concentration of 100 ng/mL to induce expression of SIRPα or SIRPα variants, or CD47 scFvs.

[1406] After 18 hours of induction, cells were spun down, and supernatants were collected. To generate cell free medium, the clarified supernatants were further filtered through a 0.22 micron filter to remove any remaining bacteria and placed on ice.

[1407] Supernatant was then analyzed by western blot. Proteins in 25 pt supernatant were transferred onto PVDF membranes and SIRPα and SIRPα variants and anti-CD47 scFv were detected using anti-V5-HRP antibody (Biolegend). Results are shown in FIG. 67. A single band was detected around 46 kDa for WT mSIRPα, 20 kDa for CV1SIRPα, 33 kDa for FD6×2 SIRPα, 42 kDa for FD6SIRPα-IgG4, 42 kDa for CV1SIRPα-IgG4, and 30 kDa for anti-CD47 scFv, respectively.

[1408] To determine whether the wild type SIRPα, SIRPα variants, and anti-CD47-scFvs secreted by the genetically engineered E. coli Nissle can functionally bind to CD47 and/or are detected by an anti-SIRPα antibody, an ELISA assay was performed by coating the plate with corresponding antibodies or ligands. Results are shown in Table 34 and indicate that both the secreted mSIRPα and anti-mCD47scFv by the genetically engineered bacteria can bind to mCD47.

TABLE 34
SIRPα/CD47 ELISA Binding Assay

Coating Materials

| Samples | mCD47 | Anti-mSIRPα | IgG | PBS |
|---|---|---|---|---|
| PBS | 0.051 | 0.054 | 0.054 | 0.051 |
| Control | 0.056 | 0.052 | 0.053 | 0.054 |
| Secreted WT | 1.069 | 0.829 | 0.056 | 0.059 |
| mSIRPα | | | | |

| | Coating Materials | | |
|---|---|---|---|
| Samples | mCD47 | IgG | PBS |
| PBS | 0.046 | 0.053 | 0.048 |
| Control | 0.049 | 0.051 | 0.048 |
| Secreted | 0.527 | 0.067 | 0.053 |
| anti-mCD47 scFv | | | |

[1409] To determine whether the SIRPα, SIRPα variants, and anti-CD47 scFv secreted from in E. coli Nissle bind to CD47 on mouse cells, flow cytometric analysis was performed using CT26 cells. CT26 is a mouse colon carcinoma cell line which expresses CD47 on its cell surface.

[1410] CT26 cells were grown in Dulbecco's Modified Eagle's Medium (DMEM) with 10% FBS and 1% Penicillin-Streptomycin. Cells were spun down, supernatant was aspirated, pellet was resuspended in 1 nil D-PBS, transferred into chilled assay tubes (1×10\hat{ }6 cells), and washed 3 times in D-PBS. Cells were resuspended in D-PBS with 0.5% BSA, to which the 10 μL of the supernatant (10× concentrated) were added and incubated for 1 hour at 4 C. Supernatant from SYN1557 was used as a baseline negative control. Cells were then resuspended in 0.5 ml PBS, diluted to proper concentration and analyzed on a flow cytometer. Results are shown in (FIG. 68 and FIG. 69). A population shift relative to baseline is observed for the samples containing the secreted SIRPα, SIRPα variants, and anti-CD47 scFv, with the greatest shift observed with SYN3021, expressing CV1SIRPα-IgG4.

[1411] Next, a competition assay was conducted to determine whether the murine SIRPα secreted by the genetically engineered bacteria could compete with the binding of a recombinant mSIRPα or an anti-CD47 antibody to murine CD47 on CT26 cells. CT26 cells were grown and flow cytometry protocol was conducted essentially as described above except that recombinant SIRPα (Rndsystems) or an anti-CD47 antibody (Biolegend) was added during the incubation of the secreted FD6×2sirpα or FD6sirpαhIgG4. FIG. 70 and FIG. 71 show the results of the competition with recombinant SIRPα and anti-CD47 antibody, respectively. Both recombinant SIRPα and anti-CD47 antibody were able to compete with the secreted SIRPα for the binding to CD47 on the CT26 cells.

### Example 28. Secretion of Hyaluronidase

[1412] To generate genetically engineered bacteria which are capable of secreting hyaluronidase, constructs were generated according to methods described herein (SYN2998: Nissle ΔPAL::CmR; p15A-ptet-RBS-PhoA--FLAG-human hyaluronidase-V5-His tags; SYN2997: Nissle ΔPAL::CmR; p15A-ptet-RBS-PhoA-FLAG-human hyaluronidase-V5-His; SYN3369: Nissle ΔPAL::CmR; p15A-ptet-RBS-PhoA-FLAG-leech hyaluronidase-V5-His).

[1413] E. coli Nissle strains SYN1557, SYN2997 (secreting mouse hyaluronidase), SYN2998 (secreting human hyaluronidase) and SYN3369 (secreting leech hyaluronidase), were grown overnight in LB medium. Cultures were diluted 1:100 in LB and grown shaking (200 rpm) to an optical density of 0.8 at which time culture was cooled down to room temperature and anhydrous tetracycline (ATC) was added to cultures at a concentration of 100 ng/mL to induce expression hyaluronidase.

[1414] After 18 hours of induction, cells were spun down, and supernatant was collected. To generate cell free medium, the clarified supernatant was further filtered through a 0.22 micron filter to remove any remaining bacteria and placed on ice.

[1415] Supernatants were then analyzed by western blot. Proteins in 25 μL supernatant were transferred onto PVDF membranes and hyaluronidase was detected using anti-V5-HRP antibody (Biolegend). Results are shown in FIG. 72. A single band was detected around 50 kDa for both secreted mouse and human hyaluronidases and around 57 kDa for leech hyaluronidase.

[1416] To determine whether the hyaluronidase secreted by the genetically engineered E. coli Nissle is active, a hyaluronidase activity assay on ability to cleave hyaluronan was performed, using biotinylated hyaluronate coated plate, according to manufacturer's instructions. Briefly, hyaluronidase will cleaved the polymer and result in the loss of biotin on plate which can then be detected by streptavidin-HPR and substrate. Results are shown in FIGS. 74A-74B and indicate that hyaluronidase secreted by the genetically engineered bacteria is able to degrade hyaluronan. The parental strain SYN1557 was used as a negative control. Results obtained for secreted leech hyaluronidase are shown in FIGS. 74A-74B.

### Example 29. An Engineered IL-15-Producing E. coli Nissle Strain

### Strain Construction and Biochemical Analysis

[1417] To generate an engineered E. coli Nissle strain capable of secreting biologically active interleukin 15 (IL-15) a fusion protein was constructed, in which IL-15 is fused to the minimal region of IL-15Rα required for the formation of a functional receptor, known as the Sushi domain. IL-15 and IL-15Rα form functional complexes, which stimulate cell signaling, and activation and proliferation of neighboring lymphocytes expressing IL-2Rβ and γc in a process called trans-presentation (see, e.g., Ochoa et al., High-density lipoproteins delivering interleukin-15; Oncoimmunology. 2013 Apr. 1; 2(4): e23410). The biological activity of IL-15 is greatly improved by two different modifications: an asparagine to aspartic acid substitution at amino acid 72 of IL-15 (Zhu X, Marcus WD, Xu W, Lee H I, Han K, Egan J O, Yovandich J L, Rhode P R, Wong H C. Novel human interleukin-15 agonists. J Immunol 2009; 183:3598-3607) and/or direct fusion with the sushi domain of IL-15Rα by mimicking trans-presentation of IL-15 by cell-associated IL-15Rα (Mortier et al., Soluble interleukin-15 receptor alpha (IL-15R alpha)-sushi as a selective and potent agonist of IL-15 action through IL-15R betagamma. Hyperagonist IL-15×IL-15R alpha fusion proteins. J Biol Chem 2006; 281:1612-9).

[1418] To produce the modified recombinant IL-15-Sushi fusion protein, IL-15 monomer with an N72D mutation was fused to the C-terminus of the sushi domain (78 amino acids) linked by a 20 amino acid linker. To the N-termini of the IL-15R sushi domain, a FLAG-tag and Factor Xa cleavage site was included to facilitate detection, purification and removal of the tag. To promote translocation to the periplasm, the IL15 fusion protein was cloned into a 10-member plasmid library. The coding sequence for the secreted fusion protein was codon optimized for expression in E. coli and ordered from IDT Technologies as a double-stranded DNA fragment. Once the DNA was received it was digested and ligated into the 10-member plasmid library using standard cloning procedures. Each member of the plasmid library contains a low-copy plasmid backbone and a Ptet promoter that drives expression of variable optimized ribosome-binding sites and secretion tags. Once the IL-15 fusion was cloned C-terminally of the secretion tags, the plasmids were transformed into SYN1557 (ΔPAL, diffusible outer membrane (DOM) phenotype) to create the IL-15-Sushi secretion strains SYN3516-SYN3525. Non-limiting examples of construct sequences include SEQ ID NOs: 1132-1137 and SEQ ID NOs: 1138-1144. Table 35 provides a description of the IL-15-Sushi strains. Table 36 provides a listing of strains generated using WT IL-15.

TABLE 35
Strain descriptions

| ID | Genotype | Construct |
|---|---|---|
| SYN3424 | PAL (PAL::Cm) | pBR322.Ptet.PpiA |
| | | (ECOLIN_18620)-IL-15 |
| SYN3423 | PAL (PAL::Cm) | pBR322.Ptet.phoA-IL-15 |
| SYN3422 | PAL (PAL::Cm) | pBR322.Ptet.PelB-IL-15 |
| SYN3421 | PAL (PAL::Cm) | pBR322.Ptet.OppA- IL-15 |
| SYN3420 | PAL (PAL::Cm) | pBR322.Ptet.MalE-IL-15 |
| SYN3419 | PAL (PAL::Cm) | pBR322.Ptet.HdeB-IL-15 |
| SYN3418 | PAL (PAL::Cm) | pBR322.Ptet.GspD-IL-15 |
| SYN3417 | PAL (PAL::Cm) | pBR322.Ptet.Gltl- IL-15 |
| SYN3416 | PAL (PAL::Cm) | pBR322.Ptet.DsbA- IL-15 |
| SYN3415 | PAL (PAL::Cm) | pBR322.Ptet.Adhesin- IL-15 |

TABLE 36
Strain descriptions

| ID | Genotype | Construct |
|---|---|---|
| SYN3525 | | pBR322.Ptet PpiA |
| | | (ECOLIN_18620)-IL-15-Sushi |
| SYN3524 | PAL (PAL::Cm) | pBR322.Ptet.phoA-IL-15-Sushi |
| SYN3523 | PAL (PAL::Cm) | pBR322.Ptet.PelB-IL-15-Sushi |
| SYN3522 | PAL (PAL::Cm) | pBR322.Ptet.OppA-IL-15-Sushi |
| SYN3521 | PAL (PAL::Cm) | pBR322.Ptet.MalE-IL-15-Sushi |
| SYN3520 | PAL (PAL::Cm) | pBR322.Ptet.HdeB-IL-15-Sushi |
| SYN3519 | PAL (PAL::Cm) | pBR322.Ptet.GspD-IL-15-Sushi |
| SYN3518 | PAL (PAL::Cm) | pBR322.Ptet.Gltl- IL-15-Sushi |
| SYN3517 | PAL (PAL::Cm) | pBR322.Ptet.DsbA- IL-15-Sushi |
| SYN3516 | PAL (PAL::Cm) | pBR322.Ptet.Adhesin- IL-15-Sushi |

[1419] Production of and in vitro quantification of IL-15 by SYN3525

[1420] To assay for production of IL-15 and/or to quantify bioactivity, cultures were grown and induced, then supernatants were harvested and quantified by ELISA. Prior to assay date, both the negative control strain (SYN1557) and the IL-15-sushi domain producing strains (SYN3516-SYN3525) were struck onto LB agar plates and grown at 37° C. with the appropriate antibiotics. A 2 mL starter culture of 2YT broth was inoculated with a single colony for every 50 mL of induced culture to be grown, allowed to grow at 37° C. for 2 hours, spun down at 8000×g for 10 minutes, and cells were resuspended in 2YT media of the original volume with the anhydrotetracycline (aTc) inducer (100 ng/mL). These cultures were placed at 30° C. with shaking for 4 hours to induce IL-15-sushi fusion protein production. Next, cultures were removed from the incubator and centrifuged at 20,000×g for 10 minutes to pellet all cells and the supernatants were passed through a 0.22 μm filter to yield sterilized supernatants. These supernatants were used in cell-based assays.

[1421] To evaluate the production of IL-15 fusions by the plasmid library, cultures of SYN1557 and the IL-15—producing library were induced and harvested in duplicate. These supernatants were serially-diluted and quantified using an IL-15 ELISA Kit (Human IL-15 Quantikine ELISA Kit—D1500, R&D Systems, Minneapolis, Minn.). The data from screening the secretion library displayed in Table 37 shows maximal production from SYN3525, which contains the PpiA secretion signal from E. coli as the leader peptide. SYN1557 supernatants showed no cross-reactivity in the ELISA (data not shown).

TABLE 37

| | Secretion |
|---|---|
| Strain | (ng/ml; average of 2) |
| SYN3525 | 84.78 |
| SYN3524 | 46.25 |
| SYN3523 | 92.88 |
| SYN3522 | 53.84 |
| SYN3521 | 54.71 |
| SYN3520 | 80.36 |
| SYN3519 | 37.98 |
| SYN3518 | 59 |
| SYN3517 | 42.81 |
| SYN3516 | 36.33 |

[1422] To further evaluate the production of IL-15 from SYN3525, the strain was grown and induced in baffled flasks to generate maximum yield. From the filtered supernatants of SYN3525, samples of SYN1557 and SYN3525 were diluted in triplicate and run on an ELISA Kit (Human IL-15 Quantikine ELISA Kit—D1500, R&D Systems, Minneapolis, Minn.). The results of these analyses are shown in Table 38. The results showed that under maximal induction conditions the SYN3525 supernatant contained between 733-795 ng/mL of material that reacted positively in the IL-15 ELISA assay. In contrast, the SYN1557 supernatants had undetectable levels (not shown).

TABLE 38
SYN3525 supernatant results from three different ELISA runs.

| SYN3525 | IL-15 (ng/ml) |
|---|---|
| Run 1 | 795.23 |
| Run 2 | 733.75 |
| Run 3 | 792.80 |
| AVERAGE | 773.93 |
| SEM (n=3) | 20.10 |

[1423] For comparison, Secretion from constructs expressing WT IL-15 are shown in Table 39.

TABLE 39

| Strain number | ng/mL (Average of 2) |
|---|---|
| SYN3424 | 2.26 |
| SYN3423 | 7.83 |
| SYN3422 | 1.78 |
| SYN3421 | 0.09 |
| SYN3420 | 0.04 |
| SYN3419 | 0.83 |
| SYN3418 | 10.42 |
| SYN3417 | 0.37 |
| SYN3416 | 1.06 |
| SYN3415 | 0.43 |

### Example 30. Functional Assay for Bacterially Secreted IL-15

[1424] Next a functional assay was conducted to demonstrate that IL-15 secreted from SYN3525 was functional. STAT3 and STATS have been shown to be phosphorylated by IL-15Ralpha upon ligand binding.

[1425] T-cells were purified from human leukopheresis via Miltenyi untouched pan-T-cell kit (yield=˜5e7 cells/prep). IL15Rα expression was induced via mild stimulation with Phytohaemagglutinin P (PHA) for 48 hrs. The activated T-cells were treated with supernatants from IL15 expressing bacteria SYN 3525 for 15 min. The treated cells were fixed in paraformaldehyde based solution followed by harsh permeabilization in 90% methanol. Modulation of phospho-STATS was quantified by multi-color flow cytometry in IL15R+CD3+ cells. Results are shown in FIG. 46 and show that SYN3525 derived IL15 exhibits bioactivity comparable to that of rhIL15. Consistent results were observed between supernatants from two individually bacterial preps.

### Example 31. Construction of a Dimerized IL-12 for Secretion

[1426] Strain Engineering:

[1427] To generate an engineered E. coli Nissle strain capable of secreting biologically active Interleukin 12 (IL-12) heterodimer, a construct was generated in which two interleukin-12 monomer subunits (IL-12A (p35) and IL-12B (p40)) were covalently linked by a linker.

[1428] To facilitate the dimerization of recombinant human IL-12 protein produced from E. coli Nissle, a 15 amino acid linker of ‘GGGGSGGGGSGGGGS’ (SEQ ID NO: 1247) was inserted between two monomer subunits (IL-12A (p35) and IL-12B (p40) to produce a forced dimer human IL-12 (diIL-12) fusion protein, and the sequence was codon-optimized.

[1429] To promote translocation to the periplasm, secretion tags were added to the N-terminus of the diIL-12 fusion protein. The DNA sequence containing the elements of the inducible Ptet promoter, ribosome binding site, diIL-12 coding sequence and other necessary linkers were synthesized by IDT Technologies and subsequently cloned into a high copy number plasmid vector. The plasmid was transformed into SYN1555, SYN1556, SYN1557 or SYN1625 (comprising the nlpl, tolA, PAL, or 1pp deletion respectively to create the diffusible membrane phenotype) to create the dimerized human IL-12 (diIL-12) secretion strains.

TABLE 40
Non-limiting IL-12 Construct Sequences

| Construct comprising secretion tag 19410 - human | SEQ ID NO: |
|---|---|
| IL-12 (p35) - Linker (15aa) - human IL-12 (p40) | 1235 |
| Construct comprising secretion tag dsba - human | SEQ ID NO: |
| IL-12 (p35) - Linker (15aa) - human IL-12 (p40) | 1146 |
| Construct comprising secretion tag phoA - human | SEQ ID NO: |
| IL-12 (p35) - Linker (15aa) - human IL-12 (p40) | 1147 |
| Construct comprising secretion tag tolB - human | SEQ ID NO: |
| IL-12 (p35) - Linker (15aa) - human IL-12 (p40) | 1148 |
| Construct comprising secretion tag malE - human | SEQ ID NO: |
| IL-12 (p35) - Linker (15aa) - human IL-12 (p40) | 1149 |
| Construct comprising secretion tag mglB - human | SEQ ID NO: |
| IL-12 (p35) - Linker (15aa) - human IL-12 (p40) | 1150 |
| Construct comprising secretion tag ompF - human | SEQ ID NO: |
| IL-12 (p35) - Linker (15aa) - human IL-12 (p40) | 1151 |
| Construct comprising secretion tag ompA - human | SEQ ID NO: |
| IL-12 (p35) - Linker (15aa) - human IL-12 (p40) | 1152 |
| Construct comprising secretion tag tort - human | SEQ ID NO: |
| IL-12 (p35) - Linker (15aa) - human IL-12 (p40) | 1153 |
| Construct comprising secretion tag lamB - human | SEQ ID NO: |
| IL-12 (p35) - Linker (15aa) - human IL-12 (p40) | 1154 |
| Construct comprising secretion tag pelB - human | SEQ ID NO: |
| IL-12 (p35) - Linker (15aa) - human IL-12 (p40) | 1156 |
| human IL-12 (p35) - Linker (15aa) - human IL-12 (p40) | SEQ ID NO: |
| | 1168 |

TABLE 41
Non-limiting IL-12 Construct Polypeptide Sequences

Description

| Construct comprising secretion tag 19410 - human | SEQ ID NO: |
|---|---|
| IL-12 (p35) - Linker (15aa) - human IL-12 (p40); | 1169 |
| (includes C terminal V5 and HIS tag and FLAG tag | |
| located at C terminus of secretion tag) | |
| Construct comprising secretion tag dsba - human | SEQ ID NO: |
| IL-12 (p35) - Linker (15aa) - human IL-12 (p40); | 1170 |
| (includes C terminal V5 and HIS tag and FLAG tag | |
| located at C terminus of secretion tag) | |
| Construct comprising secretion tag phoA - human | SEQ ID NO: |
| IL-12 (p35) - Linker (15aa) - human IL-12 (p40); | 1171 |
| (includes C terminal V5 and HIS tag and FLAG tag | |
| located at C terminus of secretion tag) | |
| Construct comprising secretion tag tolB - human | SEQ ID NO: |
| IL-12 (p35) - Linker (15aa) - human IL-12 (p40); | 1172 |
| (includes C terminal V5 and HIS tag and FLAG tag | |
| located at C terminus of secretion tag) | |
| Construct comprising secretion tag malE - human | SEQ ID NO: |
| IL-12 (p35) - Linker (15aa) - human IL-12 (p40); | 1173 |
| (includes C terminal V5 and HIS tag and FLAG tag | |
| located at C terminus of secretion tag) | |
| Construct comprising secretion tag mglB - human | SEQ ID NO: |
| IL-12 (p35) - Linker (15aa) - human IL-12 (p40); | 1174 |
| (includes C terminal V5 and HIS tag and FLAG tag | |
| located at C terminus of secretion tag) | |
| Construct comprising secretion tag ompF - human | SEQ ID NO: |
| IL-12 (p35) - Linker (15aa) - human IL-12 (p40); | 1175 |
| (includes C terminal V5 and HIS tag and FLAG tag | |
| located at C terminus of secretion tag) | |
| Construct comprising secretion tag ompA - human | SEQ ID NO: |
| IL-12 (p35) - Linker (15aa) - human IL-12 (p40); | 1176 |
| (includes C terminal V5 and HIS tag and FLAG tag | |
| located at C terminus of secretion tag) | |
| Construct comprising secretion tag tort - human | SEQ ID NO: |
| IL-12 (p35) - Linker (15aa) - human IL-12 (p40); | 1177 |
| (includes C terminal V5 and HIS tag and FLAG tag | |
| located at C terminus of secretion tag) | |
| Construct comprising secretion tag lamB - human | SEQ ID NO: |
| IL-12 (p35) - Linker (15aa) - human IL-12 (p40); | 1178 |
| (includes C terminal V5 and HIS tag and FLAG tag | |
| located at C terminus of secretion tag) | |
| Construct comprising secretion tag pelB - human | SEQ ID NO: |
| IL-12 (p35) - Linker (15aa) - human IL-12 (p40); | 1179 |
| (includes C terminal V5 and HIS tag and FLAG tag | |
| located at C terminus of secretion tag) | |
| human IL-12 (p35) - Linker (15aa) - human IL-12 (p40) | SEQ ID NO: |
| | 1191 |
| Human IL-12 monomer p35 | SEQ ID NO: |
| | 1192 |
| Human IL-12 monomer p40 | SEQ ID NO: |
| | 1193 |
| Linker | SEQ ID NO: |
| | 1194 |

[1430] Production of diIL-12 by SYN3466 to SYN3505 for In Vitro Assays:

[1431] To assay for production of IL-12 and/or to quantify bioactivity, cultures were grown and induced, then supernatants were harvested and quantified via ELISA, as follows using shaker plate. Both the negative control strain (SYN1555, SYN1556, SYN1557 or SYN1625) and the diIL-12-producing strain (SYN3466 to SYN3505) were struck onto LB agar plates and grown at 37° C. with chloramphenicol, or chloramphenicol and carbenicillin, respectively. After overnight growth, an individual colony was picked and used to inoculate a 4 mL starter culture of 2YT broth for future shaker plate to be grown. The starter cultures were inoculated with the same antibiotics used in the agar plates. When the starter culture reached saturation, the culture was back-diluted 1:25 into a new shaker plate of 2YT with appropriate antibiotics. This starter culture was allowed to grow at 37° C. for 2 hours to an OD600=˜0.8-1. The culture was then induced by adding aTc inducer (100 microg/mL). These induced cultures were incubated at 30° C. with shaking for 4 hours to promote IL-12 production.

[1432] When the production phase was complete, the shaker plate of cultures was removed from the incubator and centrifuged at 20000×g for 10 minutes to pellet all cells. The supernatants were kept for ELISA analysis.

[1433] Quantification of diIL-12 in supernatants by ELISA:

[1434] To evaluate the amounts of diIL-12 in the supernatants, samples were assayed using a Human IL-12 p70 Quantikine ELISA Kit from R&D systems. The results of these analyses are shown in Table 42.

[1435] The results showed that the supernatants contained between 17 and 309 pg/mL of material that reacted positively in the IL-12 ELISA assay. In contrast, the SYN1557 supernatants had undetectable levels.

TABLE 42
Supernatant results from ELISA analysis (pg/mL)

| Signal Peptides, | | | | | | |
|---|---|---|---|---|---|---|
| Host strain | Vector | 19410 | pelB | tort | LamB | OmpF |
| Nissle ΔnlpI::CmR | 15.1 | 130.7 | 61.4 | 255.6 | 81.6 | 17.0 |
| Nissle ΔtolA::CmR | 12.8 | 47.7 | 93.0 | 205.3 | 189.8 | 220.2 |
| Nissle | 10.2 | 142.3 | 31.2 | 266.7 | 167.0 | 62.8 |
| ΔΔPAL::CmR | | | | | | |
| Nissle Δlpp::CmR | 10.5 | 233.7 | 57.9 | 278.6 | 107.2 | 128.4 |

| Signal Peptides, | | | | | | |
|---|---|---|---|---|---|---|
| Host strain | OmpF | mglB | malE | tolB | phoA | dsbA |
| Nissle ΔnlpI::CmR | 17.0 | 194.4 | 224.7 | 234.2 | 241.9 | 99.3 |
| Nissle ΔtolA::CmR | 220.2 | 227.0 | 194.4 | 187.0 | 309.1 | 146.0 |
| Nissle ΔPAL::CmR | 62.8 | 218.4 | 256.5 | 250.0 | 203.7 | 237.0 |
| Nissle Δlpp::CmR | 128.4 | 203.3 | 242.3 | 197.2 | 250.7 | 101.9 |

### Example 32. An Engineered IL-15-Producing E. coli Nissle Strain

[1436] Strain Engineering

[1437] To generate an engineered E. coli Nissle strain capable of secreting biologically active interleukin 15 (IL-15) a fusion protein was constructed, in which IL-15 is fused to the minimal region of IL-15Rα required for the formation of a functional receptor, which is known as Sushi domain. IL-15 and IL-15Rα form functional complexes, which stimulate cell signaling, and activation and proliferation of neighboring lymphocytes expressing IL-2Rβ and γc in a process called trans-presentation (see, e.g., Ochoa et al., High-density lipoproteins delivering interleukin-15; Oncoimmunology. 2013 Apr. 1; 2(4): e23410). The biological activity of IL-15 is greatly improved by direct fusion with the sushi domain of IL-15Rα by mimicking trans-presentation of IL-15 by cell-associated IL-15Rα (Mortier et al., Soluble interleukin-15 receptor alpha (IL-15R alpha)-sushi as a selective and potent agonist of IL-15 action through IL-15R betagamma. Hyperagonist IL-15×IL-15R alpha fusion proteins. J Biol Chem 2006; 281:1612-9).

[1438] To produce the recombinant IL-15-Sushi fusion protein, IL-15 monomer was fused to the C-terminus of the sushi domain linked by a 20 amino acid linker. To promote translocation to the periplasm, 19410, tort, or pelB secretion tag was added to the N-terminus of IL-15-Sushi fusion protein. The DNA sequence containing the Ptet promoter, RBS, coding sequence for IL-15-Sushi and other necessary linkers were synthesized by IDT Technologies and subsequently cloned into a high copy number plasmid vector provided by IDT Technologies under the control of a tet-inducible promoter. The plasmids were transformed into SYN1557 (ΔPAL, diffusible outer membrane (DOM) phenotype) or SYN94 (no PAL deletion E. coli Nissle strain) to create the IL-15-Sushi secretion strains SYN3458 to SYN3463. Table 43 and Table 44 list a number of non-limiting examples of construct sequences.

TABLE 43
Non-limiting IL-15 Construct Polypeptide Sequences

| Description | Sequence |
|---|---|
| Human IL-15Rα sushi domain | |
| Construct comprising 19410 secretion tag- | SEQ ID NO: 1195 |
| Sushi- linker - human IL-15 | |
| Construct comprising tort secretion tag- | SEQ ID NO: 1196 |
| Sushi- linker - human IL-15 | |
| Construct comprising pelB secretion tag- | SEQ ID NO: 1197 |
| Sushi- linker - human IL-15 | |
| Sushi- linker - human IL-15 | SEO ID NO: 1198 |

TABLE 44
Non-limiting IL-15 Construct Polynucleotide Sequences

| Description | Sequence |
|---|---|
| Human IL-15Rα sushi domain | SEQ ID NO: 1345 |
| Construct comprising 19410 secretion tag- | SEQ ID NO: 1200 |
| Sushi- linker - human IL-15 | |
| Construct comprising tort secretion tag- | SEQ ID NO: 1201 |
| Sushi- linker - human IL-15 | |
| Construct comprising pelB secretion tag- | SEQ ID NO: 1202 |
| Sushi- linker - human IL-15 | |
| Sushi- linker - human IL-15 | SEQ ID NO: 1203 |
| Human IL-1 | SEQ ID NO: 1204 |
| Linker | SEQ ID NO: 1199 |

[1439] Production of IL-15 by SYN3458 to SYN3463 for in vitro Assays:

[1440] To assay for production of IL-15 and/or to quantify bioactivity, cultures were grown and induced, then supernatants were harvested and quantified by ELISA. Prior to assay date, both the negative control strain (SYN1557) and the IL-15-sushi domain producing strain SYN3458 to SYN3463 were struck onto LB agar plates and grown at 37° C. with the appropriate antibiotics. A 2 mL starter culture of 2YT broth was inoculated with a single colony for every 50 mL of induced culture to be grown, allowed to grow at 37° C. for 2 hours, spun down at 8000×g for 10 minutes, and cells were resuspended in 2YT media of the original volume with the anhydrotetracycline (aTc) inducer (100 ug/mL). These cultures were placed at 30° C. with shaking for 4 hours to induce IL-15-sushi fusion protein production. Next, cultures were removed from the incubator and centrifuged at 20,000×g for 10 minutes to pellet all cells and the supernatants were passed through a 0.22 μm filter to yield sterilized supernatants. These supernatants were used in cell-based assays.

### Quantification of IL-15 in SYN3458 to SYN3463 Supernatants by ELISA:

[1441] To evaluate the production of IL-15 in the filtered supernatants, samples of SYN1557 and SYN3458 to SYN3463 were diluted in triplicate and run on an Human IL-15 Quantikine ELISA Kit (Ra&D Systems). The results of these analyses are shown in Table 45. The results showed that the SYN3458 to SYN3463 supernatant contained between 4 and 275 ng/mL of material that reacted positively in the IL-15 ELISA assay. In contrast, the SYN94 and SYN1557 supernatants had undetectable levels (not shown).

TABLE 45
Supernatant results from three different ELISA runs.

| final strain | host strain | plasmid | ng/mL |
|---|---|---|---|
| SYN3460 | SYN1557 | ptet-pelBss-hIL15-SUSHI-fusion | 275 |
| SYN3461 | SYN1557 | ptet-19410ss-hIL15-SUSHI-fusion | 166 |
| SYN3458 | SYN1557 | ptet-tortss-hIL15-SUSHI-fusion | 59 |
| SYN3459 | SYN94 | ptet-tortss-hIL15-SUSHI-fusion | 78 |
| SYN3462 | SYN94 | ptet-pelBss-hIL15-SUSHI-fusion | 4 |
| SYN3463 | SYN94 | ptet-19410ss-hIL15-SUSHI-fusion | 72 |

### Example 33. CXCL10 Secretion

[1442] To produce the recombinant CXCL10 chemokine, a synthetic construct was devised (no data provided). The secreted/soluble form of the CXCL10 protein was codon optimized for expression in E. coli and ordered from IDT Technologies as a double-stranded DNA fragment. To promote translocation to the periplasm, the CXCL10 soluble protein was cloned into a 10-member plasmid library. Once the DNA was received it was digested and ligated into the 10-member plasmid library using standard cloning procedures. Each member of the plasmid library contains a low-copy plasmid backbone and a Ptet promoter that drives expression of variable optimized ribosome-binding sites and secretion tags. Once the CXCL10 was cloned C-terminally of the secretion tags, the plasmids were transformed into SYN1557 (OPAL, diffusible outer membrane (DOM) phenotype) to create the CXCL10 secretion strains, SYN3404 and SYN3406-SYN3414. Construct sequences include SEQ ID NO: 1205, SEQ ID NO: 1206, SEQ ID NO: 1208, and SEQ ID NO: 1209.

TABLE 46
Strain Descriptions

| ID | Genotype | Construct |
|---|---|---|
| SYN3414 | PAL (PAL::Cm) | p15a.Ptet.PpiA-CXCL10 |
| SYN3413 | PAL (PAL::Cm) | p15a.Ptet.phoA-CXCL10 |
| SYN3412 | PAL (PAL::Cm) | p15a.Ptet.PelB-CXCL10 |
| SYN3411 | PAL (PAL::Cm) | p15a.Ptet.OppA-CXCL10 |
| SYN3410 | PAL (PAL::Cm) | p15a.Ptet.MalE-CXCL10 |
| SYN3409 | PAL (PAL::Cm) | p15a.Ptet.HdeB-CXCL10 |
| SYN3408 | PAL (PAL::Cm) | p15a.Ptet.GspD-CXCL10 |
| SYN3407 | PAL (PAL::Cm) | p15a.Ptet.Gltl-CXCL10 |
| SYN3406 | PAL (PAL::Cm) | p15a.Ptet.DsbA-CXCL10 |
| SYN3404 | PAL (PAL::Cm) | p15a.Ptet.Adhesin-CXCL10 |

[1443] To assay for production of CXCL10 and/or to quantify bioactivity, cultures were grown and induced, then supernatants were harvested and quantified by ELISA. Prior to assay date, both the negative control strain (SYN1557) and the CXCL10-producing strains (SYN3404-SYN3414) were struck onto LB agar plates and grown at 37° C. with the appropriate antibiotics. A 2 mL starter culture of 2YT broth was inoculated with a single colony for every 50 mL of induced culture to be grown, allowed to grow at 37° C. for 2 hours, spun down at 8000×g for 10 minutes, and cells were resuspended in 2YT media of the original volume with the anhydrotetracycline (aTc) inducer (100 ng/mL). These cultures were placed at 30° C. with shaking for 4 hours to induce CXCL10 protein production. Next, cultures were removed from the incubator and centrifuged at 20,000×g for 10 minutes to pellet all cells and the supernatants were passed through a 0.22 μm filter to yield sterilized supernatants. These supernatants were used in cell-based assays.

[1444] To evaluate the production of CXCL10 by the plasmid library, cultures of SYN1557 and the CXCL10—producing library were induced and harvested in duplicate. These supernatants were serially-diluted and quantified using a CXCL10 ELISA Kit (Human CXCL10/IP-10 Quantikine ELISA Kit—DIP100, R&D Systems, Minneapolis, Minn.). The data from screening our secretion library displayed in Table 47 shows maximal production from SYN3413, which contains the PhoA secretion signal from E. coli as the leader peptide. SYN1557 supernatants showed no cross-reactivity in the ELISA (data not shown).

TABLE 47
CXCL10 Secretion

| Strain | |
|---|---|
| Name | ng/mL (Average of 2) |
| SYN3414 | 5.54 |
| SYN3413 | 52.41 |
| SYN3412 | 11.06 |
| SYN3411 | 0.14 |
| SYN3410 | 0.09 |
| SYN3409 | 3.66 |
| SYN3408 | 35.79 |
| SYN3407 | 1.25 |
| SYN3406 | 1.22 |
| SYN3405 | 1.07 |

[1445] To further evaluate the production of CXCL10 from SYN3413, the strain was grown and induced in baffled flasks to generate maximum yield. From the filtered supernatants of SYN3413, samples of SYN1557 and SYN3413 were diluted in triplicate and run on an ELISA Kit (Human CXCL10/IP-10 Quantikine ELISA Kit—DIP100, R&D Systems, Minneapolis, Minn.). The results of these analyses are shown in Table 112. The results showed that under maximal induction conditions the SYN3413 supernatant contained between 199-232 ng/mL of material that reacted positively in the CXCL10 ELISA assay. In contrast, the SYN1557 supernatants had undetectable levels (not shown).

TABLE 48
Concentration of Secreted hCXCL10 from triplicate SYN3414

| SYN3414 | CXCL10 (ng/ml) |
|---|---|
| Run 1 | 199.71 |
| Run 2 | 231.96 |
| Run 3 | 232.16 |
| AVERAGE | 221.28 |
| SEM (n = 3) | 10.78 |

### Functional Assay for CXCL10

[1446] To determine whether CXCL10 secreted from any of the strains described above is functional, a Chemotaxis Assay is performed, essentially as described in Mikucki et al. (Mikucki, et al., Non-redundant Requirement for CXCR3 Signaling during Tumoricidal T Cell Trafficking across Tumor Vascular Checkpoints; Nat Commun. 2015; 6: 7458, the contents of which is herein incorporated by reference in its entirety).

[1447] Briefly, cell trace labeled naïve (or expanded) human CD8+ T cells are transferred into 24-well transwell plate (5 uM pore) with T cells on top (5×105 cells) and rCXCL10/supernatants on bottom, in the presence or absence of PTX or anti-CXCL10)->Cells are incubated for 3 hrs, and migrated cells are counted by flow cytometry. Alternatively, phosphoAKT is measured by flow, western or ELISA.

### Example 34. Generation of STING Agonist Producing Strains

[1448] To generate STING agonist strains, DacA (Listeria monocytogenes cyclic di AMP synthase) was cloned into p15 under the control of the Pₜₑₜpromoter; to generate the strain as described in Table 50. Summarizes sequences of the constructs.

TABLE 49
c-di-AMP producing strain

| Strain: | Genotype |
|---|---|
| SYN3527 | Nissle p15A Ptet-DacA (listeria |
| | monocytogenes cyclic di AMP |
| | synthase) |

### Example 35. In Vitro STING Agonist Production

[1449] The ability of the newly generated strain to produce c-di-AMP was first assessed in vitro.

[1450] E. coli Nissle strains SYN3527 (comprising the DacA construct) and a control strain were grown overnight in LB medium. Cultures were diluted 1:25 in M9 minimal media supplemented with 0.5% glucose (w/v) and grown shaking (350 rpm) at 37° C. for 2 hours. Cultures were diluted to an optical density of 0.5 at which time anhydrous tetracycline (ATC) was added to cultures at a concentration of 100 ng/mL to induce expression of DacA. After 4 hours of induction, samples were removed for LC/MS analysis of cyclic dinucleotide production. Samples were centrifuged for 20 minutes at 5000 RPM to separate cellular and extracellular fractions. Cell pellets were then used to determine intracellular cyclic-di-AMP and the media supernatants were used to determined extracellular accumulation of cyclic-di-AMP. Concentrations were determined via LC/MS.

[1451] Results are shown in FIG. 2. and indicate that engineered strains were able to produce c-di-AMP intracellularly and, to a lesser extent, extracellularly. For the wild-type control, cyclic-di-AMP was not found in either the intracellular or extracellular fractions (data not shown).

[1452] FIG. 3 depicts a follow on study conducted essentially as described above.

### Example 36. Bacterially Produced STING Agonists Induce the Immune Response

[1453] To determine whether bacterially produced STING agonists or the bacterial chassi themselves is responsible for induction of the immune response, live and heat-killed SYN3527 (comprising plasmid based DacA under control of a tetracycline-inducible promoter (p15-ptet-DacA)); were added to the supernatant of RAW 267.4 mouse macrophage cell line and levels of IFN-beta1 mRNA were measured.

[1454] As seen in FIG. 4, IFNb1 mRNA expression increases with c-di-AMP secreting strain dose-dependently, but not when heat killed.

### Example 37. Activity of STING Agonist Producing Strain In Vivo

[1455] To determine the tolerability, colonization and activity of the STING agonist producing strain SYN3527 (E. coli Nissle comprising plasmid-based, tetracycline-inducible p15a Ptet-DacA from Listeria monocytogenes, tumor volume, weight and T cell response was assessed in the B16 tumor model.

[1456] To produce cells for the study, overnight cultures were used to inoculate 500 mL LB medium with antibiotic. The strains were incubated with shaking at 37 C until the culture reached the end of log phase (OD600=0.8-1.0). To harvest, cells were spun down at 5000 rpm for 20 min, media was aspirated, cells were washed with PBS, resuspended in 15% Glycerol and PBS, aliquoted and frozen at −80 C. Cells were concentration tested by serial plating.

[1457] Mice were implanted with B16 tumors, and mice injected intratumorally with bacteria producing STING agonists and controls, according to the time line described below and in FIG. 7A. Samples taken at various timepoints were processed for CFU counts per gram of tumor, cytokine analysis (IFN-beta and T cell panels) and flow cytometric analysis of tumor draining lymph nodes (TDLN).

[1458] Briefly, B16 cells were implanted (2×10e5 cells/mouse in PBS) SC into the right flank of each animal on day −9. On day Day −3 tumor growth was monitored; when the tumors reached ˜50-80 mm\hat{ }3 on day 1, mice were randomized into groups (N=15 per group/5 mice/timepoint) for intratumor dosing as follows: saline (control, group 1), SYN94 (streptomycin resistant Nissle, group 2, 1×10e7), and SYN3527 (STING Agonist, group 3, 1×10e7) Animals were dosed with appropriate bacteria based on group or saline (to control for injection). Four hours later, mice were treated with 10 ug ATC (anhydrotetracycline) via intraperitoneal injection. On day 2, 5 mice from each treatment group were sacrificed 5 mice/group (Group 1-4) 24 hours after ATC dose and samples were processed for analysis. On day 4, mice were weighed, tumor volumes were measured, and mice were dosed with the appropriate treatment/group. Four hours later, mice were injected with 10 ug ATC. On day 5, 5 mice/group were sacrificed 24 hours after the ATC dose. On day 8, the tumors in the remaining mice were weighed, measured and mice were dosed with appropriate treatment/group. On day 9, 5 mice/group were sacrificed for 24 hours after ATC dose.

[1459] Tumor volume at day 1, 4, and 9 are shown in FIG. 7B and for individual mice in FIG. 7C and indicate that administration of SYN3527 results in rejection or control of tumor growth over this time period (p<0.02 for SYN3527 vs Saline Control on Day 9). Tumor weight shown in FIG. 7D at day 9 following administration of STING agonist producing bacteria shows significant tumor regression compared to saline control treatments (p<0.02). Flow cytometric analysis of lymphocytes from the tumor draining lymph node were performed by placing cells into single cell suspension and straining with the following antibodies: Anti-CD4-APC, TCR-beta-PECy7, CD8-alpha-BV785, CD25-BV650, and FoxP3-PE (all from Biolegend). Tumor regression correlates with an increase in total T cell numbers in the tumor draining lymph node (TDLN), as measured by flow cytometric analysis (p<0.03 for SYN3527 vs Saline Control), which may indicate activation and expansion of tumor specific T cells (FIG. 7E).

[1460] To evaluate of tumor colonization and bacterial growth following SYN-STING treatment of B16F10 tumors, B16F10 tumors were essentially treated as described above. On day 9 post initiation of treatment tumors were homogenized. Homogenates were serially diluted and plated on LB agar plates to calculate the number of viable bacteria (or colony forming units) per gram tissue within tumors. SYN-STING samples were plated on agar plates containing the appropriate antibiotic to ensure bacteria did not lose expression of STING circuit. Results are shown in FIG. 7H.

[1461] For cytokine analysis, a Luminex assay was performed according to manufacturer's instructions. To determine the activation of the innate immune system by the bacterially produced STING agonist, levels of INF-beta1, IL-6, IL-1beta, and MCP-1 (Cc12)) were assessed and results for day 2 and day 9 are shown in FIG. 8A and FIG. 8B. Results indicate that STING agonists produced by SYN3527 are able to increase significantly the IFN-beta production at day 2 in the tumor (P<0.008 vs control or SYN94), as well as induce the general innate immune response over saline and Nissle alone at day 2, but not day 9, as shown by IL-6 (p<0.006 vs Control), TNFα (** p<0.002 vs Control, * p<0.01 vs SYN94) and MCP-1 induction. The innate response within the tumor at day 2 was switched to a T-cell related response at day 9, as shown by the production of T-cell related cytokines granzyme B (p<0.006 vs Control; <0.03 vs SYN94, IL-2 (p<0.03 vs Control) and IL-15 (p<0.05 vs Control or SYN94) (FIG. 8B). FIG. 9 shows cytokines upregulated by bacterial injection (i.e., both WT and SYN-STING).

### Example 38. Activity of Adenosine Consuming Strain in Combination with Systemic Anti-PD-1 and Anti-CTLA-4 in MC38 Tumor Model

[1462] The ability of the adenosine consuming strain SYN1656 to augment the anti-tumor response of combined anti-CTLA4 and anti-PD-1 was assessed in the C57BL/6-MC38 syngeneic tumor model.

[1463] To produce cells used in the study, overnight cultures were used to inoculate 500 mL LB medium with antibiotic. The strains were incubated with shaking at 37 C until the culture reached the end of log phase (OD600=0.8-1.0). To harvest, cells were spun down at 5000 rpm for 20 min, media was aspirated, cells were washed with PBS, resuspended in 15% Glycerol and PBS, aliquoted and frozen at −80 C. Cells were concentration tested by serial plating.

[1464] Mice were implanted with MC38 tumors, and mice injected intratumorally with the adenosine consuming bacteria and intraperitoneally with anti-CTLA-4 and anti-PD-1 antibodies according to the study design in Table 54. MC38 cells were implanted (1×105/mouse/100 μL) SC into the right flank of each animal on day −9. Tumor growth was monitored; when the tumors reached ˜50-80 mm\hat{ }3 on day 1, mice were randomized into treatment groups as shown in Table 50.

[1465] Tumor volumes and body weights were recorded three times in a week with a gap of 1-2 days in between two measurements.

TABLE 50
Study design

| | | Treatment 1 | | | | Treatment 2 | | | | |
|---|---|---|---|---|---|---|---|---|---|---|
| | | Test | | | | Test | | | | Treatment 3 |
| Group | N | Article | Route | Dose | Schedule | Article | Route | Dose | Schedule | Compound |
| 1 | 12 | Anti- | i.p. | 200 ug | Day 2, 5, | Anti- | i.p. | 100 ug | Day 2, 5, | NA |
| | | PD-1 | | | 8, 11, 14, | CTLA-4 | | | 8, 11, 14, | |
| | | Isotype | | | 17, 20 | Isotype | | | 17, 20 | |
| | | Control | | | | Control | | | | |
| 2 | 12 | Anti- | i.p. | 200 ug | Day 2, 5, | Anti- | i.p. | 100 ug | Day 2, 5, | NA |
| | | PD-1 | | | 8, 11, 14, | CTLA-4 | | | 8, 11, 14, | |
| | | | | | 17, 20 | | | | 17, 20 | |
| 3 | 12 | Anti- | i.p. | 200 ug | Day 2, 5, | Anti- | i.p. | 100 ug | Day 2, 5, | SYN094, 5e6 bacteria, |
| | | PD-1 | | | 8, 11, 14, | CTLA-4 | | | 8, 11, 14, | i.t., BIWx3 |
| | | | | | 17, 20 | | | | 17, 20 | Starting on Day 1 |
| 4 | 12 | Anti- | i.p. | 200 ug | Day 2, 5, | Anti- | i.p. | 100 ug | Day 2, 5, | SYN825, 5e6 bacteria, |
| | | PD-1 | | | 8, 11, 14, | CTLA-4 | | | 8, 11, 14, | i.t., BIWx3 |
| | | | | | 17, 20 | | | | 17, 20 | Starting on Day 1 |
| 5 | 12 | Anti- | i.p. | 200 ug | Day 2, 5, | Anti- | i.p. | 100 ug | Day 2, 5, | SYN1656, 5e6 bacteria, |
| | | PD-1 | | | 8, 11, 14, | CTLA-4 | | | 8, 11, 14, | i.t., BIWx3 |
| | | | | | 17, 20 | | | | 17, 20 | Starting on Day 1 |

[1466] Results show that the adenosine consuming strain has the ability to improve anti-CTLA-4/anti-PD-1 antibody-mediated anti-tumor activity in the MC38 model. Specifically, in the anti-PD-1/anti-CTLA-4 group, 5 out of 12 mice responded to the treatment, including 1 out of 12 with a complete response. In the anti-PD-1/anti-CTLA-4 plus SYN1656 group, the same number (5 out of 12) responded, but at least 4 out of 5 responders were complete responders.

### Example 39. Generation of a Strain for the Conversion of 5-FC to 5-FU

[1467] 5-FU is a common chemotherapeutic limited by its systemic toxicity. However, 5-FC is much better tolerated. Using codA (cytosine deaminase) or a fusion of the codA (cytosine deaminase) and upp (uracil phosphoribosyltransferase), 5-FC can be converted into active drug form—5F-UMP—in the tumor, minimizing associated side effects.

[1468] To generate 5-FU producing strains, codA (cytosine deaminase) or a fusion of the codA (cytosine deaminase) and upp (uracil phosphoribosyltransferase) was cloned into a p15 vector under the control of the Ptet promoter; to generate the strain as described in Table 51.

TABLE 51

| Strain: | Genotype |
|---|---|
| SYN3529 | Nissle pUC-Kan-tet-CodA (cytosine deaminase) |
| SYN3620 | Nissle p15A Ptet-CodA::Upp fusion |

### Example 40. In Vitro Conversion of 5-FC to 5-FU

[1469] The ability of the newly generated strain to convert 5-FC to 5-FU was first assessed in vitro.

[1470] E. coli Nissle strains SYN3529, SYN3620 described above and SYN94 control (wild type Nissle with streptomycin resistance), were grown overnight in LB medium. Cultures were diluted 1:50 in M9 minimal media supplemented with 0.5% glucose (w/v) and grown shaking (350 rpm) at 37° C. for 2 hours, at which time anhydrous tetracycline (ATC) was added to cultures at a concentration of 100 ng/mL to induce expression of CodA or CodA-Upp fusion. After 2 hours of induction, cultures were spun down, media was aspirated and the cell pellets were resuspended into M9+0.5% glucose (w/v)+ATC (100 ng/mL)+10 mM 5-fluorocytosine (Sigma-Aldrich®). These cultures were then returned to the 37° C. incubator and allowed to incubate with shaking for additional 2 hours at which point samples were removed for LC/MS analysis of 5-FU production. Samples were centrifuged for 20 minutes at 5000 RPM to separate cellular and extracellular fractions. Cell pellets were then used to determine intracellular 5-FC and 5-FU and the media supernatants were used to determined extracellular accumulation of 5-FU or consumption of 5-FC.

[1471] Results are shown in FIG. 34A and FIG. 34B. and indicate that engineered strains were able to degrade 5-FC (FIG. 34A) and to produce 5-FU (FIG. 34B) at a rate higher than that of the wild type control strain. Since there was no available standard for 5-FUMP, we were unable to measure the accumulation of 5-FUMP from SYN3620.

### Example 41. In Vivo Activity of 5F-C to 5-FU Converter in the CT26 Tumor Model

[1472] To determine In Vivo activity and efficacy of 5-FC to 5-FU converting strains SYN3529 (comprising pUC-Kan-tet-CodA (cytosine deaminase)) and SYN3620 (comprising pUC-Kan-tet-CodA::Upp fusion), tumor volume was assessed and compared to PBS control in the CT26 tumor model.

[1473] To produce cells for the study, overnight cultures were used to inoculate 500 mL LB medium with antibiotic. The strains were incubated with shaking at 37 C until the culture reached the end of log phase (OD600=0.8-1.0). To harvest, cells were spun down at 5000 rpm for 20 min, media was aspirated, cells were washed with PBS, resuspended in 15% Glycerol and PBS, aliquoted and frozen at −80 C. Cells were concentration tested by serial plating.

[1474] Mice were implanted with CT26 tumors, injected intratumorally with bacteria producing enzymes capable of converting 5-FC into 5-FU or vehicle control, and dosed with 5-FC according to the time line described below and in FIG. 35A. Tumor volumes were measured at various time points, while tumors were weighed and processed at the conclusion of the experiment to evaluate relative consumption of 5-FC as a measure of the strains bioactivities.

[1475] Briefly, CT26 cells were implanted (1×10\hat{ }6 cells/mouse in PBS) SC into the right flank of each animal on day −15. Tumor growth was monitored until the tumors reached ˜150-450 mm\hat{ }3. On day 0, mice were randomized into groups (N=5 per group) for intratumor dosing as follows: PBS (group 1, vehicle control), SYN3529 (group 2, 1×10\hat{ }7 CFU), SYN3620 (group 3, 1×10\hat{ }7 CFU). Tumor sizes were measured and mice were injected I.T. with bacteria or PBS on day 0, 2, and 5, followed by ATC (lug I.P.) 4 hours later. Starting on day 3, 5-FC (500 mg/kg) was administered daily via IP injection. Mice were sacrificed on day 6 for final analysis.

[1476] Average tumor volumes at day 0, 2, and 5 are shown in FIG. 35B and for individual mice in FIG. 35C, and indicate that administration of either SYN3529 or SYN3560 alongside 5-FC results in a blunting of tumor growth over this time period compared to PBS control. Tumor weight shown in FIG. 35D at day 6 following administration of bacteria, day 3 post 5-FC dosing, shows reduction in tumor mass compared to PBS control treatments. Mass spectrometry analysis of tumor homogenates demonstrate a reduction in 5-FC levels for bacterially colonized tumors compared to PBS controls, suggesting in situ conversion of 5-FC to its active form 5-FU (FIG. 35E).

### Example 42. Generation of a Combined Kynurenine Consumer and a STING Agonist Producer and In Vitro Measurement of Strain Activity

[1477] To generate a strain that consumes kynurenine and produces a STING agonist, SYN2028 (comprising Nissle HA3/4::PSynJ23119-pKynase TrpE::CmR) was transformed with the construct previously used in SYN3527 (DacA cloned into a p15 vector under the control of the Ptet promoter); to generate the strain as described in Table 52.

TABLE 52

| Strain: | Genotype |
|---|---|
| SYN2028 | Nissle HA3/4::PSynJ23119-pKynase TrpE::CmR |
| SYN3527 | Nissle p15A Ptet-DacA (listeria monocytogenes cyclic di |
| | AMP synthase) |
| SYN3831 | Nissle HA3/4::PSynJ23119-pKynase TrpE::CmR; p15a |
| | Ptet - DacA |

Next, the ability of the newly generated strain to consume kynurenine and to produce a STING agonist was assessed in vitro. E. coli Nissle strains SYN094 (wild-type control), SYN2028 (KYN), SYN3527 (STING) and SYN3831 (KYN+STING) were grown overnight in LB medium containing appropriate antibiotics. Cultures were diluted 1:25 in M9 minimal media supplemented with 0.5% glucose (w/v) and appropriate antibiotics or LB and antibiotics and grown shaking (350 rpm) at 37° C. for 2 hours.

[1478] For measurement of cyclic-di-AMP production, cultures in the M9 media were diluted with the same M9 supplemented media to an optical density (600 nm) of 0.5 at which time anhydrous tetracycline (ATC) was added to cultures at a concentration of 100 ng/mL to induce expression of DacA. Cells were induced for a further 4 hours to allow accumulation of cyclic-di-AMP.

[1479] Samples were removed for LC/MS analysis of cyclic dinucleotide production. Samples were centrifuged for 5 minutes at 10000×g to separate cellular and extracellular fractions. Cell pellets were then used to determine intracellular cyclic-di-AMP. Concentrations were determined via LC/MS. For quantifying kynurenine consumption, the LB cultures were spun down and resuspended in LB with 100 μM L-kynurenine (Sigma-Aldrich®) to an optical density (600 nm) of 1.0. These cultures were then placed at 37° C. with shaking for 4 hours to allow consumption of kynurenine. For kynurenine consumption measurements, samples were removed from each culture and spun for 5 minutes at 10000×g to separate the cellular and extracellular fractions. Media supernatant was removed and used to determine consumption of kynurenine via LC/MS analysis. Results shown in FIG. 17A indicate that the engineered strain SYN3831 was able to produce cyclic-di-AMP similar to SYN3527, where it's kynurenine-consuming parent, SYN2028, was not able to produce cyclic-di-AMP. Results of FIG. 17B indicate that the new combo strain SYN3831 also retained the ability to consume kynurenine similarly to it's parent

[1480] SYN2028. Taken together these results support that in vitro the combo strain SYN3831 possesses the ability to both produce the STING agonist cyclic-di-AMP, as well as consume the AHR agonist, kynurenine.

### Example 43. Functional Assay for Secreted IFN-Gamma

[1481] Next, studies were conducted to demonstrate that IFN-gamma secreted from genetically engineered bacteria is functional. A cell-based assay was employ based on increased phosphorylation of STAT1 upon binding of IFNgamma to its receptor. Bioactivity of IFN-gamma can be determined by quantification of STAT1 phosphorylation via flow cytometry.

[1482] Next, studies were conducted to demonstrate that IFN-gamma secreted from genetically engineered bacteria is functional. A cell-based assay was employ based on increased phosphorylation of STAT1 upon binding of IFNgamma to its receptor. Bioactivity of IFN-gamma can be determined by quantification of STAT1 phosphorylation via flow cytometry.

[1483] Briefly, mouse RAW264.7 cells were treated with supernatants from murine IFNg expressing bacteria (SYN3543 comprising PAL::Cm p15a Ptet-87K PhoA-mIFNg) for 15 min. Treated cells were fixed in paraformaldehyde based solution followed by harsh permeabilization in 90% methanol. Modulation of phospho-STAT1 was quantified by flow cytometry, and results are shown in FIGS. 39A and 39B.

[1484] FIG. 39A and FIG. 39B, shows bioactivity of SYN3543 in two independent assays.

### Example 44. Activity of CD40L Secreting Strain SYN3367 In Vivo

[1485] To determine the in vivo activity of the CD40L secreting strain SYN3367 (comprising PAL::Cm pUC-tet-PhoA-mCD40L 112-260; referred to in this Example and FIG. 36 as SYN-CD40L), intratumoral antigen presenting cell (APC) activation was assessed by flow cytometry and compared to treatment with either SYN1557 (DOM mutant; referred to in this Example and FIG. 36 as SYN) or recombinant mouse CD40L (R&D Systems) in the CT26 tumor model.

[1486] To produce bacterial cells for the study, overnight cultures were used to inoculate 500 mL LB medium with antibiotic. The strains were incubated with shaking at 37 C until the culture reached the end of log phase (OD600=0.8-1.0). To harvest, cells were spun down at 5000 rpm for 20 min, media was aspirated, cells were washed with PBS, resuspended in 15% Glycerol and PBS, aliquoted and frozen at −80 C. Cells were concentration-tested by serial plating.

[1487] Briefly, CT26 cells were implanted (1×10\hat{ }6 cells/mouse in PBS) SC into the right flank of each animal. Tumor growth was monitored; when the tumors reached ˜80-100 mm\hat{ }3, mice were randomized into groups (N=6 per group) for intratumor dosing as follows: SYN1557 (leaky phenotype DOM mutant, group 1, 1×10\hat{ }7), SYN3367 (mCD40L secreter, group 2, 1×10\hat{ }7), and recombinant mCD40L (1 ug; Group 3). On day 0, mice were injected I.T. with bacteria. On day 1, 4, and 7, all groups were injected with 1 ug of ATC via IP injection (in three pulses). On day 1, 4, and 7, Group 3 was treated with 1 ug recombinant CD40L via I.T. injection. On day 8, all mice were sacrificed with 3 mice utilized to analyze activation of intratumoral APCs via flow cytometry and 3 mice utilized to measure bacterial colonization via CFU plating.

[1488] Three representative tumors were homogenized, tumor homogenates were serially diluted and plated on LB Agar plates containing the appropriate antibiotics in order to measure the colony forming unit concentration. As depicted in FIG. 36B, SYN-CD40L colonized tumors to a similar extent as SYN reaching up to 1×10⁸ CFUs/gram tumor. Flow cytometric analysis of intratumoral APCs from three representative tumors were performed by digesting tumors in a mixture of DNAse and Liberase TL (Sigma) for 30 minutes at 37° C., placing cells into single cell suspension and straining with the following antibodies: Anti-MHCII(IA/IE), CD45.2, CD40, Gr1, CD197(CCR7), CD11b, CD11c (all from Biolegend). Treatment of CT26 tumors with SYN-CD40L resulted in higher levels of CCR7 expression on intratumoral dendritic cells (p<0.04 for SYN-CD40L vs. SYN control) with a trend towards higher expression on macrophages as well (FIG. 36C). Additionally, a trend towards higher expression for CD40 was observed on both dendritic cells and macrophages in the tumor. These results suggest that treatment with SYN-CD40L results an increased activation of critical APC subsets within the tumor.

### Example 45. Activity of hTNFa in CT26 Tumors

[1489] To determine In Vivo activity of hTNFa expressing strain SYN2304 (comprising PAL::CM p15a TetR Ptet-PhoA-TNFα; referred to in this Example and FIG. 38 as SYN-TNFα) tumor volume was assessed and compared to SYN1557 (DOM mutant; referred to in this Example and FIG. 38 as SYN) in CT26 tumors.

[1490] To produce bacterial cells for the study, overnight cultures were used to inoculate 500 mL LB medium with antibiotic. The strains were incubated with shaking at 37 C until the culture reached the end of log phase (OD600=0.8-1.0). To harvest, cells were spun down at 5000 rpm for 20 min, media was aspirated, cells were washed with PBS, resuspended in 15% Glycerol and PBS, aliquoted and frozen at −80 C. Cells were concentration tested by serial plating.

[1491] Briefly, CT26 cells were implanted (1×10\hat{ }6 cells/mouse in PBS) SC into the right flank of each animal. Tumor growth was monitored; when the tumors reached ˜50-80 mm\hat{ }3, mice were randomized into groups (N=5 per group) for intratumor dosing as follows: SYN (leaky phenotype DOM mutant, group 1, 1×10\hat{ }7), and SYN-TNFα (TNFα secreter, group 2, 1×10\hat{ }7). On days 0 and 4, mice were injected I.T. with bacteria. On days 1 and 4, both groups were given 1 ug of ATC via IP injection (in two pulses). Tumor size was measured 2× times a week. Tumors were homogenized, tumor homogenates were serially diluted and plated on LB Agar plates containing the appropriate antibiotics in order to measure the colony forming unit concentration. As depicted in FIG. 38B, SYN-TNFα colonized tumors to a similar extent as SYN, reaching up to 1×10⁸ CFUs/gram tumor. Intrumoral expression of hTNFa was only detected in SYN-TNFα treated CT26 tumors, as measured by hTNFa ELISA (R&D Systems) (FIG. 38C). Results in FIG. 38D show significantly reduced tumor growth for CT26 tumors treated with SYN-TNFα at day 7 post first bacterial dose compared to treatment with SYN (P<0.02). Taken together these results demonstrate the SYN-TNFα is capable of colonizing and persisting in CT26 tumors, where they express detectable levels of hTNFa and result in a significant reduction in tumor growth.

### Example 46. Activity of mIFNgamma Secreting Strain SYN3367 In Vivo

[1492] To determine the in vivo dynamics of the IFNgamma expressing strain SYN3367 (comprising PAL::Cm p15a Ptet-87K PhoA-mIFNg; referred herein as SYN-IFNγ) CT26 tumors were treated and compared to SYN1557 (DOM mutant; referred herein as SYN) treated tumors.

[1493] To produce bacterial cells for the study, overnight cultures were used to inoculate 500 mL LB medium with antibiotic. The strains were incubated with shaking at 37 C until the culture reached the end of log phase (OD600=0.8-1.0). To harvest, cells were spun down at 5000 rpm for 20 min, media was aspirated, cells were washed with PBS, resuspended in 15% Glycerol and PBS, aliquoted and frozen at −80 C. Cells were concentration tested by serial plating.

[1494] Briefly, CT26 cells were implanted (1×10\hat{ }6 cells/mouse in PBS) SC into the right flank of each animal. Tumor growth was monitored; until tumors reached ˜50-80 mm\hat{ }3 when mice were randomized into groups (N=6 per group) for intratumor dosing as follows: SYN (leaky phenotype DOM mutant, group 1, 1×10\hat{ }7) and SYN-IFNγ (IFNgamma secreter, group 2, 1×10\hat{ }7) On day 0 and day 3 mice were dosed with the appropriate bacterial strain. On days 1, 4 and 7 4, all mice were injected I.P. with 1 ug ATC (in three pulses). On day 8, all mice were sacrificed with 3 mice utilized to measure intratumoral bacterial colonization via CFU plating and 3 mice utilized to analyze intratumoral IFNγ production by ELSIA. Tumors were homogenized, tumor homogenates were serially diluted and plated on LB Agar plates containing the appropriate antibiotics in order to measure the colony forming unit concentration. As depicted in Figure XB, SYN-IFNγ colonized tumors to a similar extent as SYN, reaching up to 1×10⁸ CFUs/gram tumor. Intrumoral expression of IFNγ was only detected in SYN-IFNγ treated CT26 tumors, as measured by murine IFNγ ELISA (R&D Systems) (FIG. 40C). Taken together these results demonstrate the SYN-IFNγ is capable of colonizing and persisting in CT26 tumors, where they express detectable levels of IFNγ following induction with ATC.

### Example 47. Functional Assay for Secreted CXCL10

[1495] To determine whether human CXCL10 secreted from any of the strains described above is functional, a Chemotaxis Assay was performed, essentially as described in Mikucki et al. (Mikucki, et al., Non-redundant Requirement for CXCR3 Signaling during Tumoricidal T Cell Trafficking across Tumor Vascular Checkpoints; Nat Commun. 2015; 6: 7458, the contents of which is herein incorporated by reference in its entirety). In this assay, human CD8+ T cells (8 days post anti-CD3/CD28 expansion) were cell trace violet labeled and transferred into a 24-well transwell plate (5 uM pore) with T cells on top and bacterial supernatants on bottom, in the presence or absence of anti-hCXCR3. Cells were incubated for 3 hrs, and migrated cells recovered from the bottom of wells were counted by flow cytometry.

[1496] To prepare the bacterial supernatants, strains (SYN1557 control strain and SYN2942 (comprising PAL::Cm Ptet-87K PhoA (ECOLIN_02255))) were thawed and grown over night, then induced to express hCXCL10 by addition of tetracycline for 3 hours. Supernatants were sterifiltered and then used as noted below. To prepare the T cells, pre-isolated primary human CD8 T cells (AllCells) were counted, harvested and resuspended in T cell media, approximately 8 days post stimulation with anti-CD3/CD28beads. 24-well trans well plates with space 0.5 ml on bottom and 0.1 nil on top of the wells and 5 uM pore size were used for the assay. To prepare bacterial supernatants for the bottom of the well, supernatants from SYN2942 were diluted in supernatants taken from SYN1557 control bacteria to generate mixtures containing 100%, 33%, 11%, 3.7%, and 0% SYN2942. To prepare the top of the well, 100 uL of T cells were added to the top well (containing approximately 2.5×10 cells). Anti-CXCR3(mouse IgG1; clone G025H7) was added to the control wells at a final concentration of 1 ug/ml). Plates were placed in 37 C incubator for 3 hours before analysis. For analysis, the contents of each bottom well were transferred to two wells of a 96-well plate. Plates were spun down, two wells were combined, resuspended in PBS, and analyzed on a MACSQuant flow cytometer to quantify the number of migrated cells. Primary human T cells trafficked towards SYN2942 supernatants in a dose-dependent manner which was abrogated by blockade of CXCL10's receptors CXCR3. This data (not shown) would suggest that the hCXCL10 produced by SYN2942 is biologically active and abundant in sufficient concentrations to trigger primary T cell trafficking in vitro.

### Example 48. Evaluation of Efficacy of SYN3527 Treatment in a Balb/c-A20 Tumor Model

[1497] To determine In Vivo activity and efficacy of SYN3527 (comprising plasmid-based tet-inducible dacA from Listeria monocytogenes), over time at three different doses and compared to PBS control in the c-A20 tumor model (A20 B-cell lymphoma).

[1498] To produce cells for the study, overnight cultures were used to inoculate 500 mL LB medium with antibiotic. The strains were incubated with shaking at 37 C until the culture reached the end of log phase (OD600=0.8-1.0). To harvest, cells were spun down at 5000 rpm for 20 min, media was aspirated, cells were washed with PBS, resuspended in 15% Glycerol and PBS, aliquoted and frozen at −80 C. Cells were concentration tested by serial plating.

[1499] Female Balb/c mice 6 weeks of age were implanted with A20 tumors, injected intratumorally with three different doses of bacteria producing enzymes capable of producing c-diAMP. Tumor volumes were measured at various time points, while tumors were weighed and processed at the conclusion of the experiment.

[1500] Briefly, A-20 cells were implanted (2×10 5/mouse/100 μL in PBS) SC into the right flank of each animal on day −15. Tumor growth was monitored until the tumors reached ˜100 mm\hat{ }3. On day 0, mice were randomized into groups (N=8 per group) for intratumor dosing as follows: PBS (group 1, vehicle control), SYN3527 (group 2, 1×10\hat{ }7 CFU), SYN3527 (group 3, 5×10\hat{ }7 CFU), and SYN3527 (group 4, 5×10\hat{ }8 CFU). Tumor sizes were measured and mice were injected I.T. with bacteria or PBS on day 0, 2, and 5, followed by ATC (lug I.P.) 4 hours later.

[1501] Animals were dosed with appropriate bacteria based on group or saline (to control for injection) on days 0, 3, and 7. Four hours after dosing with the bacteria, mice were treated with 10 ug ATC (anhydrotetracycline) via intraperitoneal injection. Tumor volumes and body weights were recorded three times in a week with a gap of 1-2 days in between two measurements.

[1502] Tumor volume at day 1, 4, and 12 are shown in FIG. 11 and for up to 27 days in individual mice in FIG. 12A (saline control), FIG. 12B (1×10\hat{ }7 CFU), FIG. 12C (5×10\hat{ }7 CFU), and FIG. 12D (5×10\hat{ }8 CFU). Results indicate that administration of SYN3527 drives dose-dependent tumor control in A20 lymphoma model.

### Example 49. Combining STING Initiator and Kyn Sustainer: Improved Efficacy with aPD1 Checkpoint Inhibition

[1503] Next combination of an immune initiator/sustainer pair was tested, alone or in combination with checkpoint inhibitor therapy. To determine the efficacy of the initiator STING producing strain SYN3527 (E. coli Nissle comprising plasmid-based, tetracycline-inducible p15a Ptet-DacA from Listeria monocytogenes) in combination with the sustainer Kynurenine consuming strain SYN2028 (comprising integrated kynureninase under constitutive promoter and ΔTrpE), tumor volume, survival and body weight was monitored in a B16F10 tumor model, which is considered an immunologically “cold” tumor model. To assess whether checkpoint inhibition would further improve efficacy of the initiator/sustainer pair, the effect of the addition of an anti-PD1 antibody administered systemically was also assessed. Mice were treated with 2 doses of the STING agonist producing strain (initiator) followed by either anti-PD1, Kynurenine-consuming strain or the combination (sustainer).

[1504] To produce cells for the study (SYN3527 and SYN2028), overnight cultures were used to inoculate 500 mL LB medium with antibiotic. The strains were incubated with shaking at 37 C until the cultures reached the end of log phase (OD600=0.8-1.0). To harvest, cells were spun down at 5000 rpm for 20 min, media was aspirated, cells were washed with PBS, resuspended in 15% Glycerol and PBS, aliquoted and frozen at −80 C. Cells were concentration tested by serial plating.

[1505] Mice were implanted with B16F10 tumors, and mice injected intratumorally with bacteria producing STING agonists and subsequently with bacteria that consume kynurenine, according to the time line described below. Briefly, B16F10 cells were implanted (2e5 cells/mouse in PBS) SC into the right flank of each animal on day −9. On day day −3 tumor growth was monitored; when the tumors reached ˜50-80 mm³ on day 0, mice were randomized into experimental groups (N=10 per group) for intratumor dosing as follows: Group 1: Saline+Isotype control; Group 2: Saline+anti-PD1 antibody; Group 3: SYN3527 [1e7]+Isotype control; Group 4: SYN3527 [1e7]+anti-PD1 antibody; Group 5: SYN3527 [1e7]->SYN3527:SYN2028 [1e7]->SYN2028 [1e7]+Isotype control; Group 6: SYN3527 [1e7]->SYN3527:SYN2028 [1e7]->SYN2028 [1e7]+anti-PD1 antibody; Group 7: SYN3527 [1e6]->SYN3527 [1e7]+Isotype control; Group 8: SYN3527 [1e6]->SYN3527 [1e7]+anti-PD1 antibody. Isotype control and anti-PD1 antibody were dosed at 200 ug per injection Animals were dosed with appropriate bacteria based on group on day 1, day 5, and day 8. Four hours after each bacterial dose, mice were treated with 10 ug ATC (anhydrotetracycline) via intraperitoneal injection. Bacterial dosing was stopped for complete responders. Table 53 provides a summary of the treatment timeline. Results are shown in Table 54.

TABLE 53
Summary of Treatment Timeline

| | | | | 2X weekly, |
|---|---|---|---|---|
| | | | | starting at Day |
| | | | | 8 until end of |
| Group | Day 1 | Day 5 | Day 5 | study (Day 21) |
| 1 | Saline | Randomize prior | Saline + Iso | Saline + Iso |
| 2 | | to day 5 | Saline + PD1 | Saline + PD1 |
| | | treatment | | |
| 3 | SYN3527 | Randomize prior | SYN3527 | Saline + Iso |
| | [1e7] | to day 5 | [1e7] + Iso | |
| 4 | | treatment | SYN3527 | Saline + PD1 |
| | | | [1e7] + PD1 | |
| 5 | | | SYN3527 | SYN2028 |
| | | | [5e6] + | [1e7] + Iso |
| | | | SYN2028 | |
| | | | [5e6] + Iso | |
| 6 | | | SYN3527 | SYN2028 |
| | | | [5e6] + | [1e7] + PD1 |
| | | | SYN2028 | |
| | | | [5e6] + PD1 | |
| 7 | SYN3527 | Randomize prior | SYN3527 | SYN3527 |
| | [1e6] | to day 5 | [1e7] + Iso | [1e7] + Iso |
| 8 | | treatment | SYN3527 | SYN3527 |
| | | | [1e7] + PD1 | [1e7] + PD1 |

TABLE 54
Study Results

| | Complete Response | Partial Response | |
|---|---|---|---|
| | (CR) (Tumor | (PR) (<50 mm³ | ORR |
| Group | Regression) | tumors) | (CR + PR) |
| Saline | 0 out of 5 | 0 out of 5 | 0 out of 5 |
| | (0%) | (0%) | (0%) |
| aPD-1 | 0 out of 5 | 0 out of 5 | 0 out of 5 |
| | (0%) | (0%) | (0%) |
| STING | 3 out of 16 | 0 out of 16 | 3 out of 16 |
| | (18.75%) | (0%) | (18.75%) |
| STING + aPD-1 | 2 out of 16 | 1 out of 16 | 3 out of 16 |
| | (12.5%) | (6.25%) | (18.75%) |
| STING → Kyn | 2 out of 15 | 0 out of 15 | 2 out of 15 |
| | (13.3%) | (0%) | (13.3%) |
| STING → Kyn + | 4 out of 16 | 2 out of 16 | 6 out of 16 |
| aPD-1 | (25%) | (12.5%) | (37.5%) |

[1506] Dosing was discontinued for mice with tumors that demonstrated a complete or partial response to treatment and mice were monitored for durable response for 50 days. No tumors relapsed during this time period.

[1507] Next, animals showing CR were re-challenged by tumor re-implantation on the contralateral flank from the first tumor implant to assess whether the treatment with SYN3527 could confer immunological memory. Briefly, B16F10 cells were re-implanted on day 71 into the 11 complete responders from Groups 3-8 and compared to naïve animals (n=6). Results are shown in FIG. 12 and demonstrate a significant delay in tumor growth for mice which previously underwent a CR to the initial SYN3527 treatment, compared to naïve controls, implying the formation of immunological memory.

### Example 50. Assessment of Safety and Biocontainment Strategies: Proliferation of Auxotrophic Mutants in Tumors

[1508] The ability of auxotrophic mutant strains to proliferate in tumors was assessed. Three auxotrophic strains were generated: SYN1193 (ΔUraA::CM), SYN1534 or SYN1605 (ΔThyA::CM), SYN766 (ΔDapA::CM).

[1509] Proliferation of the auxotrophic strains were first assessed in the CT26 model. CT26 cells (˜1e6 cells/mouse in PBS) were implanted subcutaneously into the right flank of each animal (BalbC/J (female, 8 weeks-of-age)), and tumor growth was monitored for approximately 10 days. When the tumors reached ˜100-150 mm³, animals were randomized into groups for dosing.

[1510] For intratumoral injection, bacteria were grown in LB broth containing thymidine (3 mM), diaminopimelic (100 ug/mL DAP) acid or uracil as needed until reaching an absorbance at 600 nm (A600 nm) of 0.4 (corresponding to 2e8 colony-forming units (CFU)/mL) and washed twice in PBS. The suspension was diluted in PBS or saline so that 40 uL can be injected at the appropriate doses intratumorally into tumor-bearing mice.

[1511] Bacteria were suspended in PBS and mice were injected (1e6 cells/mouse) with 40 uL intratumorally as follows: Group 1-SYN94 (n=6), Group 2—SYN1193 (n=6), Group 3—SYN1534 (n=6), and Group 2—SYN766 (n=6). Tumor tissue was harvested at 24 and 72 hours. Tumor tissue homogenates were serially diluted and plated on LB agar plates (containing antibiotic and thymidine, diaminopimelic acid or uracil) to calculate the number of viable bacteria (or colony forming units) per gram tissue within tumors. Results in FIG. 18A show that strains comprising the ΔThyA and ΔUraA mutations are able to colonize and proliferate in the tumor, similar to the unmodified E. coli Nissle strain. Mutations in the pyrimidine pathways prevent bacteria from growing in the absence of a pyrimidine source, however, results indicate that sufficient levels of these nutrients are present in the tumor to allow colonization and growth. As such, these auxotrophic mutations are useful for biocontainment strategies by preventing growth in the absence of pyrimidines, while not negatively affecting growth and colonization properties and, by extension, effector production or efficacy within the tumor.

[1512] In contrast, the strain containing the ΔDapA mutation does not proliferate and lower numbers of bacteria are detected after 24 hours and 72 hours than were originally injected. Diaminopimelic acid (Dap) is an amino acid that is made by bacteria but not the mammalian host. It is a characteristic component of certain bacterial cell walls, e.g., of gram negative bacteria. Without diaminopimelic acid, bacteria are unable to form proteoglycan, and as such are unable to grow. As such, a DapA auxotrophy may affect bacterial growth and colonization of tumor and may present a particularly useful strategy to temporally modulate, fine tune timing, the extent of bacterial presence in the tumor and/or effector expression and production levels over time

[1513] Follow-on studies were conducted with ThyA auxotrophic strain in B16F10 and EL4 cells, shown in FIG. 18B and FIG. 18C. The ThyA auxotrophic strain was able to proliferate at a similar rate as the WT strain over the 72-hour time frame, recapitulating the growth patterns observed relative to the unmodified strain in the CT26 model.

### Example 51. Modulating Temporal Dose Through Chassis Modifications: Potential to Improve Therapeutic Window with DAP-STING Strain

[1514] Various methods to control levels and timing of effector production in vivo were assessed, each of which could be used individually or in combination (to allow for tighter control). Studies to assess the ability to control or fine-tune levels and timing of effector molecule production using inducible promoters (tetracycline, cumate, salicylate or hypoxia/anaerobiosis inducible) were conducted and are described below.

[1515] Additionally, the ability to regulate levels and timing of effector molecule production through controlling abundance of the genetically engineered bacteria was assessed. As described in the previous examples, it was advantageously found that DapA auxotrophic strains are unable to grow and colonize the tumor. Therefore, the DapA auxotrophy might present a means of gaining temporal control over bacteria load and dose and by extension effector payload delivery and abundance.

[1516] To test the effect of DapA on STING production, STING producer SYN4023 (E. coli Nissle comprising plasmid-based, tetracycline-inducible p15a Ptet-DacA from Listeria monocytogenes and ΔDapA) was generated. Next, the ability to modulate bacterial growth or colonization of the tumor and effector production was tested.

[1517] To determine the efficacy of treatments comprising the DAP-STING strain SYN4023 (E. coli Nissle comprising p15a Ptet-DacA from Listeria monocytogenes and ΔDapA), tumor volume and body weight was monitored in a B16F10 tumor model.

[1518] To produce cells for the study, overnight cultures were used to inoculate 500 mL LB medium with antibiotic. The strains were incubated with shaking at 37 C until the culture reached the end of log phase (OD600=0.8-1.0). To harvest, cells were spun down at 5000 rpm for 20 min, media was aspirated, cells were washed with PBS, resuspended in 15% Glycerol and PBS, aliquoted and frozen at −80 C. Cells were concentration tested by serial plating.

[1519] Mice were implanted with B16F10 tumors, and mice injected intratumorally with bacteria producing STING agonists, according to the time line described below. Briefly, B16F10 cells were implanted (2e5 cells/mouse in PBS) SC into the right flank of each animal on day −9. On day Day −3 tumor growth was monitored; when the tumors reached ˜50-80 mm³ on day 0, mice were randomized into groups (N=10 per group) for intratumor dosing as follows: saline (control, group 1), SYN4023 (DAP-STING) group 2, 1e7 CFU) and SYN4023 (DAP-STING) group 3, 1e8 CFU) Animals were dosed with appropriate bacteria based on group or saline (to control for injection) on days 1, 5 and 8. Four hours before the bacterial dose, mice were treated with 10 ug ATC (anhydrotetracycline) via intraperitoneal injection. Bacterial dosing was stopped for complete responders.

[1520] Tumor volumes at day 5, 8, and 12 are shown in FIG. 19A. Tumor volumes for individual mice in are shown in FIG. 19B, FIG. 19C and FIG. 19D. Results indicate that administration of SYN4023 at a dose of 1e8 results in rejection or control of tumor growth over this time period.

[1521] Additionally, these results indicate that limitation of bacterial growth through introduction of an DapA auxotrophy does not reduce efficacy of the strain.

### Example 52. Exclusion of Cytokine Release Syndrome

[1522] Cytokine release syndrome (CRS) is a form of systemic inflammatory response syndrome that arises as a complication of some diseases or infections and is also an adverse effect of some monoclonal antibody drugs, as well as adoptive T-cell therapies, such as CAR-T therapy. Cytokine release syndrome is caused by a large, rapid release of cytokines into the blood from immune cells during the course of an immunotherapy Similarly, systemic bacterial infection can lead to a rapid release of cytokines in a process known as sepsis. To ensure that intratumoral bacterial treatment would not lead to elevated levels of cytokines related to CRS or sepsis in the blood of mice, levels of cytokines in blood were measured upon treatment of tumors with the STING agonist producing bacteria and corresponding unmodified controls.

[1523] B16F10 tumors were implanted and monitored as described elsewhere herein, and mice were randomized and injected I.T. at time 0 according to groups as follows: saline, SYN3527 (STING, induced) at 1e7 CFU, SYN3527 (STING, uninduced) at 1e7 CFU, SYN4023 (STING DAP, induced) at 1e8 CFU or SYN94 (unmodified bacterium) at 1e7 CFU (n=12 per group). An LPS induced sepsis Control (500 ug in 100 uL PBS) was included in the study and administered intravenously. Four hours after each bacterial dose, mice were treated with 10 ug ATC (anhydrotetracycline) via intraperitoneal injection (induced) or with PBS vehicle control (uninduced). Mice were sacrificed at 1, 5, and 24 hours (4 mice per timepoint). Levels TNFα, and IL-1β in the blood was quantified using a custom Luminex kit according to manufacturer's instructions. Results are shown in FIG. 20 and indicate that cytokine levels fall well below those observed in the sepsis control. These data suggest that septic shock and cytokine storm does not occur following treatment of SYN3527 or SYN4023 in tumor bearing mice.

[1524] Tumors homogenates (1 hr, 5 hrs, 24 hrs) were analyzed for production of the STING agonist c-di-AMP via liquid chromatography mass spectrometry and CFUs were measured via plating on LB plates. FIG. 20C shows c-diAMP measurements and confirms that c-di-AMP is generated by both SYN3527 and SYN4023 (when induced with ATC) in vivo. FIG. 20D shows CFU counts and demonstrates that SYN3527 colonize and grown in the tumor to a similar extent as the unmodified SYN94, while the ΔDapA strain, SYN4023, shows reduced bacterial numbers over the time period measured (24 hrs). Of note, all blood samples were negative for bacterial growth. Of note, no release of cytokines into the blood stream occurs following treatment with any of the bacterial strains analyzed. Overall, these results indicate that intratumoral treatment of B16F10 tumors and the expression of STING agonist is safe and does not cause a systemic increase in sepsis or cytokine storm related cytokines.

### Example 53. STING Polymorphisms: Building Additional Agonist-Producing Strains to Address Multiple Alleles

[1525] Multiple alleles have been described for human STING (hSTING). Different STING agonists activate these alleles with different specificities (see e.g., Yi et al., Single Nucleotide Polymorphisms of Human STING Can Affect Innate Immune Response to Cyclic Dinucleotides; PLOS One October 2013 I Volume 8 I Issue 10 I e77846, the contents of which is herein incorporated by reference in its entirety). STING senses cyclic-di-nucleotides from bacteria and/or an endogenous cyclic GAMP. In addition to production of c-di-AMP, as shown herein for SYN3527, production of additional or alternative agonists could potentially be used to augment stimulation of additional alleles and could provide more flexibility to modulate efficacy of the engineered strain.

[1526] A phylogenetic library of putative cGAMP synthases (21 proteins) was identified based on homology to a the known cGAMP synthase (cGAS) DncV. To generate STING agonist strains, cGAS orthologs were cloned into p15 under the control of the Ptet promoter. The cGAS orthologs were then screened to identify alternative enzymes capable of producing cGAMP in vitro.

[1527] Briefly, E. coli Nissle strains comprising the heterologous construct encoding one of the cGAS orthologs and a control strain were grown overnight in LB medium. Cultures were diluted 1:10 in M9 minimal media supplemented with 0.5% glucose (w/v) and grown shaking (350 rpm) at 37° C. for 2 hours. Cultures were diluted to an optical density of 1.0 at which time anhydrous tetracycline (ATC) was added to cultures at a concentration of 100 ng/mL to induce expression of cGAS. After 4 hours of induction, samples were removed for LC/MS analysis of cyclic dinucleotide production. Samples were centrifuged for 20 minutes at 5000 RPM to separate cellular and extracellular fractions. Cell pellets were then used to determine intracellular 3′,3′ cGAMP. Concentrations were determined via LC/MS.

[1528] Results are shown in FIG. 33A and FIG. 33B. As shown previously, SYN3527 produces high levels of cdAMP. No significant production was observed in other strains tested. However, several significant producers of cGAMP were identified (SYN4251, SYN4240, SYN4241). SYN4251 expresses an ortholog from Verminephrobacter eiseniae (EF01-2 Earthworm symbiont), SYN4240 an ortholog from Kingella denitrificans (ATCC 33394), and SYN4241 an ortholog from Neisseria bacilliformis (ATCC BAA-1200). Sequences are described in Table 55.

TABLE 55
Bacterial cGAMP producing strains

| | | | SEQ ID NO |
|---|---|---|---|
| Strain | | Uniprot | Polypeptide/ |
| Name | Gene Name | ID | Polynucleotide |
| SYN4240 | HMPREF9098_1812 | F0F127 | SEQ ID NO: 1260/SEQ |
| | | | ID NO: 1263 |
| SYN4241 | HMPREF9123_0074 | F2B8M1 | SEQ ID NO: 1261/SEQ |
| | | | ID NO: 1264 |
| SYN4251 | Veis_4659 | A1WRU9 | SEQ ID NO: 1262/SEQ |
| | | | ID NO: 1265 |

### Example 54. Antitumor Efficacy of SYN4023 Treatment for the A20 Tumor Model

[1529] Anti-tumor activity of SYN4023 (ptet-DacA and \DapA) was assessed in the A20 tumor model.

[1530] To produce cells for the study, overnight cultures were used to inoculate 500 mL LB medium with antibiotic. The strains were incubated with shaking at 37 C until the culture reached the end of log phase (OD600=0.8-1.0). To harvest, cells were spun down at 5000 rpm for 20 min, media was aspirated, cells were washed with PBS, resuspended in 15% Glycerol and PBS, aliquoted and frozen at −80 C. Cells were concentration tested by serial plating.

[1531] Mice were implanted with A20 tumors (1e6 cells/mouse in PBS) SC into the right flank of each animal on Day −14. On Day −3 tumor growth was monitored; when the tumors reached ˜40-80 mm³ mice (Day 0) were randomized into experimental groups (N=12 per group) for intratumor dosing as shown in Table 56.

TABLE 56
Experimental groups

| Group No | | |
|---|---|---|
| (n = 12) | Treatment | Dosing Schedule |
| 1 | Saline | 40 uL saline day 1 and 4 |
| 2 | SYN4023 (ptet-DacA; | [1e8 CFU] in 40 uL day |
| | ΔDapA) | 1 and 4 |

[1532] Animals were dosed with SYN4023 bacteria or saline I.T. on day 1 and day 4. Four hours before each bacterial dose, mice were pretreated with 10 ug ATC (anhydrotetracycline) via intraperitoneal injection. Tumor volume was measured, and animal health was assessed 3x/week. Results are shown in FIG. 21 and indicate that treatment of A20 tumors with SYN4023 results in tumor control and rejection. These data demonstrate the SYN4023 treatment is efficacious with only two doses in the A20 tumors model.

### Example 55. Augmentation of Immune Stimulator Efficacy with DAP Auxotroph STING Agonist Producing Strain

[1533] Agonistic antibodies triggering immune stimulation via OX40, 41BB and GITR have been shown to promote antitumor immunity via the expansion and proliferation of cytotoxic CD8+ and helper CD4+ T cells (Sanmamed, M. F., et al. (2015). “Agonists of Co-stimulation in Cancer Immunotherapy Directed Against CD137, OX40, GITR, CD27, CD28, and ICOS.” Semin Oncol 42(4): 640-655, the contents of which is herein incorporated by reference it's entirety), and thus we sought to evaluate the combined efficacy of these treatments with our STING agonist producing bacterial strains.

[1534] To determine whether SYN4023 (E. coli Nissle comprising plasmid-based, tetracycline-inducible p15a Ptet-DacA from Listeria monocytogenes and ΔDapA) can augment efficacy of aOX40, a41BB, and aGITR, tumor growth was monitored in a B16F10 tumor model.

[1535] To produce cells for the study, overnight cultures were used to inoculate 500 mL LB medium with antibiotic. The strains were incubated with shaking at 37 C until the cultures reached the end of log phase (OD600=0.8-1.0). To harvest, cells were spun down at 5000 rpm for 20 min, media was aspirated, cells were washed with PBS, resuspended in 15% Glycerol and PBS, aliquoted and frozen at −80 C. Cells were concentration tested by serial plating.

[1536] Mice were implanted with B16F10 tumors (2e5 cells/mouse in PBS) SC into the right flank of each animal on Day −9. On Day −3 tumor growth was monitored; when the tumors reached ˜40-80 mice (Day 0) were randomized into experimental groups (N=10 per group) for intratumor dosing as shown in Table 57.

TABLE 57
Experimental groups

| Group No | Intratumoral | Systemic |
|---|---|---|
| (n = 10) | Treatment | Treatment |
| 1 | PBS | PBS |
| 2 | PBS | αOX40 |
| 3 | PBS | α41BB |
| 4 | PBS | αGITR |
| 5 | SYN4023 (DAP-STING) [1e8] | PBS |
| 6 | SYN4023 (DAP-STING) [1e8] | αOX40 |
| 7 | SYN4023 (DAP-STING) [1e8] | α41BB |
| 8 | SYN4023 (DAP-STING) [1e8] | αGITR |

[1537] Animals were dosed with SYN4023 bacteria I.T. and appropriate antibody I.P. twice a week for the duration of the study. Antibody treatments (I.P.) were as follows: anti-OX-40 (anti-OX-40 at 100 μg per dose), anti-GITR (DTA-1 at 350 μg per dose), and a4-1BB (LOB12.3 at 350 μg per dose). Four hours before each bacterial dose, mice were treated with 10 ug ATC (anhydrotetracycline) via intraperitoneal injection. Bacterial dosing was stopped for complete responders. Tumor growth was measured on days 3, 6, 9 and 13 as shown in FIG. 22A (median volume) and FIG. 22B, FIG. 22C, FIG. 22D, FIG. 22E, FIG. 22F, FIG. 22G, and FIG. 22H (individual mice). Results indicate that co-administration of SYN4023 with various agonist antibodies results in superior control of tumor growth and tumor rejection compared to agonist antibodies alone. These data, as well as those described above, demonstrate the ability of STING-agonist producing to improve the efficacy of both immune checkpoint and immune agonist therapies.

### Example 56. In Vivo Promoter Studies in the B16F10 Tumor Model

[1538] As a means of control over immunological payload delivery, the function and utility of several inducible promoter systems was evaluated. The activity of low oxygen inducible FNR, cumate-inducible, and salicylate-inducible promoters were assessed in the tumor microenvironment in vivo.

[1539] To evaluate expression of various inducible promoters within tumors following induction, GFP reporter constructs were generated driven by the various promoters to be tested. RFP driven by a constitutive promoter was used to identify and isolate the bacterial cells within the tumors.

[1540] B16F10 (implanted at 2e5) were implanted as described herein and allowed to reach a tumor size of −100 mm³ before dosing. On day 1 of the study, mice were randomized into groups (8 mice per group; 4 mice per time point) and injected with the inducible-GFP strains as listed in Table 58. Inducers were administered I.P. at 48 hrs post bacteria injection (Day 3).

TABLE 58
Experimental groups

| Group | Strain | Inducer |
|---|---|---|
| 1 | SYN4360 (Tet-GFP:Con-RFP) [0.5e6] | aTC (10 ug) |
| 2 | SYN4359 (fnr-GFP:Con-RFP) [0.5e6] | none |
| 3 | SYN4352 (asp-GFP:Con-RFP) [0.5e6] | Sodium salicylate (150 |
| | | uL of 100 mM in PBS) |
| 4 | SYN4352 (asp-GFP:Con-RFP) [0.5e6] | none |
| 5 | SYN4353 (cum-GFP:Con-RFP) [0.5e6] | water-soluble Cumate |
| | | (6 mg in 200 uL PBS) |
| 6 | SYN4353 (cum-GFP:Con-RFP) [0.5e6] | none |
| 7 | No injection control | none |

[1541] At 1 and 16 hrs post inducer injection (Day 3 and Day 4), tumors were crushed in 40 uM cell strainer and spun at 700 g for 5 min. Supernatants were transferred to a new tube and spun at 4,000 rpm for 10 min. Pellets were resuspended in 500 uL PBS and 200 uL was transferred to 96-well plate for flow cytometric analysis. Results are shown in FIG. 24 and FIG. 25. FIG. 24 shows the percentage of RFP positive (bacterial cells, no tumor cells) which are GFP-positive (i.e., in which the promoter is active). Note, the percentage of bacterial cells in which the three promoters are active was the same at 1 and 16 hrs. FIG. 25 depicts the mean fluorescence intensity (MFI) measuring overall reporter gene expression levels. With exception of the tet-inducible construct, which shows higher expression levels at 16 hours, these expression levels also remain the same over the two timepoints. Taken together, these results indicate that all three promoters tested are capable of driving reporter gene expression, a proxy for an immunological payload, in vivo in the tumor.

### Example 57. Administration of WT STING Strain Results in Long-Term Immunological Memory

[1542] The ability of the complete regressions elicited by SYN3527 (WT Tet-STING) to result in long lasting immunological memory was assessed in the A20 tumor model.

[1543] Animals (n=4) with complete regression from SYN3527 treatment in the SYN3527 Dose Response Study (Example 52, FIG. 65) were used and compared to naïve age-matched mice.

[1544] Naïve control mice were implanted with A20 tumors (2e5 cells/mouse in PBS) SC into the right flank of each animal on Day −14. Mice previously treated with SYN3527 (and having shown complete regression) were implanted with A20 tumors (2e5 cells/mouse in PBS) SC into the left flank, opposite flank from original tumor, on day 60 after the original treatment.

TABLE 59
Experimental groups

| Group No | | |
|---|---|---|
| (n = 4) | Mice | Treatment |
| 1 | Animals with complete | Implant cells on left flank- |
| | regressions from SYN3527 | opposite flank from original |
| | treatment in SYN3527 | tumor in mice previously |
| | Dose Response Study | treated with SYN3527 |
| 2 | Naïve Age-matched controls | Right flank |

[1545] Tumor volume and body weight were measured 3 times per week and animal health was assessed three times per week. Results are depicted in FIG. 13 and show that administration of WT STING strain results in long-term immunological memory. In contrast to the naïve controls, no recurring tumors were observed in the animals previously treated with SYN3527, indicating a lasting memory response.

### Example 58. Promoter Studies (Comparison of FNR, Cumate Inducible and Salicylate Inducible Promoters

[1546] FNR, cumate-inducible and salicylate-inducible promoters were assessed for their ability to allow regulatable and efficacious effector expression levels in vitro.

[1547] The salicylate sensor circuit PSal/NahR biosensor circuit employed (Part:BBa_J61051) was originally adapted from Pseudomonas putida. The nahR gene was mined from the 83 kb naphthalene degradation plasmid NAH7 of Pseudomonas putida, encoding a 34 kDa protein which binds to nah and sal promoters to activate transcription in response to the inducer salicylate (Dunn, N. W., and I. C. Gunsalus. (1973) Transmissible plasmid encoding early enzymes of naphthalene oxidation in Pseudomonas putida. J. Bacteriol. 114:974-979). NahR is constitutively expressed by a constitutive promoter (Pc), and the expression of the protein of interest is positively regulated by NahR in the presence of inducers. Here, the Biobrick BBa_J61051 (containing the gene encoding NahR driven by a constitutive promoter and the PSal promoter was cloned preceding dacA in the backbone p15.

[1548] The basic mechanism by which the cumate-regulated expression functions in the native P. putida Fl and how it is applied to E. coli has been previously described (see e.g., Choi et al., Novel, Versatile, and Tightly Regulated Expression System for Escherichia coli Strains; Appl. Environ. Microbiol. August 2010 vol. 76 no. 15 5058-5066). Essentially, the cumate circuit or switch includes four components: a strong promoter, a repressor-binding DNA sequence or operator, expression of cymR, a repressor, and cumate as the inducer. The addition of the inducer changes causes the formation of a complex between cumate and CymR and results in the removal of the repressor from its DNA binding site, allowing expression of the gene of interest. Here a construct comprising the cymR gene driven by a constitutive promoter and a cymR responsive promoter was cloned in front of the DacA gene in p15 to allow cumate inducible expression.

[1549] The ability of these promoters to drive expression of DacA and allow production of c-di-AMP in vitro was assessed. Fragments containing FNR, cumate-inducible and salicylate-inducible promoters were cloned into p15 containing the dacA construct. Strains were designated as follows as shown in Table 60.

TABLE 60
Inducible DacA Strains

| | | | | DacA Construct | | Regulators |
|---|---|---|---|---|---|---|
| | | | | sequence | Promoter | and other |
| | Construct | Parental strain | | (SEQ ID NO) | (SEQ ID NO) | (SEQ ID NO) |
| 1 | tet-dacA | SYN94 | SYN3527-km | | | |
| 2 | salicylate-dacA | SYN94 | SYN4031-km | 1275 | 1273, 1274 | 1276, 1277, |
| | | | | | | 1278, 1279, |
| | | | | | | 1280 |
| 3 | cumate-dacA | SYN94 | SYN4340-km | 1265 | 1270, 1271 | 1266, 1267, |
| | | | | | | 1268, 1269 |
| 4 | fnr-dacA | SYN94 | SYN4448-km | 1284 | 1281, 1282 | |
| 5 | tet-dacA | SYN766 (ΔDapA) | SYN4023-cm-km | | | |
| 6 | salicylate-dacA | SYN766 (ΔDapA) | SYN4356-cm-km | 1275 | 1273, 1274 | 1276, 1277, |
| | | | | | | 1278, 1279, |
| | | | | | | 1280 |
| 7 | cumate-dacA | SYN766 (deltaDapA) | SYN4357-cm-km | 1265 | 1270, 1271 | 1266, 1267, |
| | | | | | | 1268, 1269 |
| 8 | fnr-dacA | SYN766 (deltaDapA) | SYN4449-cm-km | 1284 | 1281, 1282 | |

TABLE 61
Activity comparison between strains
with unmodified and ADapA chassis

| | | | Unmodified/ |
|---|---|---|---|
| Construct | unmodified | auxotroph | DeltaDap |
| tet-dacA | SYN3527-km | SYN4023-cm-km | 1.06 |
| salicylate-dacA | SYN4031-km | SYN4356-cm-km | 0.96 |
| cumate-dacA | SYN4340-km | SYN4357-cm-km | 1.05 |
| fnr-dacA | SYN4448-km | SYN4449-cm-km | 1.24 |

### Example 59. Generation of a ThyA Auxotrophy (ΔthyA)

[1550] An auxotrophic mutation causes bacteria to die in the absence of an exogenously added nutrient essential for survival or growth because they lack the gene(s) necessary to produce that essential nutrient. In order to generate genetically engineered bacteria with an auxotrophic modification in the genetically engineered strains, the thyA, a gene essential for oligonucleotide synthesis, is deleted. Deletion of the thyA gene in E. coli Nissle yields a strain that cannot form a colony on LB plates unless they are supplemented with thymidine. A thyA::cam PCR fragment is amplified using 3 rounds of PCR as follows. For the first PCR round, 4×50 ul PCR reactions containing 1 ng pKD3 as template, 25 ul 2×phusion, 0.2 ul primer SR36 and SR38, and either 0, 0.2, 0.4 or 0.6 ul DMSO are brought up to 50 ul volume with nuclease free water and amplified under the following cycle conditions:

[1551] step1: 98c for 30s

[1552] step2: 98c for 10s

[1553] step3: 55c for 15s

[1554] step4: 72c for 20s

[1555] repeat step 2-4 for 30 cycles

[1556] step5: 72c for 5 min

[1557] Subsequently, 5 ul of each PCR reaction is run on an agarose gel to confirm PCR product of the appropriate size. The PCR product is purified from the remaining PCR reaction using a Zymoclean gel DNA recovery kit according to the manufacturer's instructions and eluted in 30 ul nuclease free water.

[1558] For the second round of PCR, 1 ul purified PCR product from round 1 is used as template, in 4×50 ul PCR reactions as described above except with 0.2 ul of primers SR33 and SR34. Cycle conditions are the same as noted above for the first PCR reaction. The PCR product run on an agarose gel to verify amplification, purified, and eluted in 30 ul as described above.

[1559] For the third round of PCR, 1 ul of purified PCR product from round 2 is used as template in 4×50 ul PCR reactions as described except with primer SR43 and SR44. Cycle conditions are the same as described for rounds 1 and 2. Amplification is verified, the PCR product purified, and eluted as described above. The concentration and purity is measured using a spectrophotometer. The resulting linear DNA fragment, which contains 92 bp homologous to upstream of thyA, the chloramphenicol cassette flanked by frt sites, and 98 bp homologous to downstream of the thyA gene, is transformed into a E. coli Nissle 1917 strain containing pKD46 grown for recombineering. Following electroporation, 1 ml SOC medium containing 3 mM thymidine is added, and cells are allowed to recover at 37 C for 2h with shaking. Cells are then pelleted at 10,000×g for 1 minute, the supernatant is discarded, and the cell pellet is resuspended in 100 ul LB containing 3 mM thymidine and spread on LB agar plates containing 3 mM thy and 20 ug/ml chloramphenicol. Cells are incubated at 37 C overnight. Colonies that appeared on LB plates are restreaked. + cam 20 ug/ml + or − thy 3 mM. (thyA auxotrophs will only grow in media supplemented with thy 3 mM).

[1560] Next, the antibiotic resistance is removed with pCP20 transformation. pCP20 has the yeast Flp recombinase gene, FLP, chloramphenicol and ampicillin resistant genes, and temperature sensitive replication. Bacteria are grown in LB media containing the selecting antibiotic at 37° C. until OD600=0.4-0.6. 1 mL of cells are ished as follows: cells are pelleted at 16,000×g for 1 minute. The supernatant is discarded and the pellet is resuspended in 1 mL ice-cold 10% glycerol. This step is repeated 3× times. The final pellet is resuspended in 70 ul ice-cold 10% glycerol. Next, cells are electroporated with 1 ng pCP20 plasmid DNA, and 1 mL SOC supplemented with 3 mM thymidine is immediately added to the cuvette. Cells are resuspended and transferred to a culture tube and grown at 30° C. for 1 hours. Cells are then pelleted at 10,000×g for 1 minute, the supernatant is discarded, and the cell pellet is resuspended in 100 ul LB containing 3 mM thymidine and spread on LB agar plates containing 3 mM thy and 100 ug/ml carbenicillin and grown at 30° C. for 16-24 hours. Next, transformants are colony purified non-selectively (no antibiotics) at 42° C.

[1561] To test the colony-purified transformants, a colony is picked from the 42° C. plate with a pipette tip and resuspended in 10 μL LB. 3 μL of the cell suspension is pipetted onto a set of 3 plates: Cam, (37° C.; tests for the presence/absence of CamR gene in the genome of the host strain), Amp, (30° C., tests for the presence/absence of AmpR from the pCP20 plasmid) and LB only (desired cells that have lost the chloramphenicol cassette and the pCP20 plasmid), 37° C. Colonies are considered cured if there is no growth in neither the Cam or Amp plate, picked, and re-streaked on an LB plate to get single colonies, and grown overnight at 37° C.

[1562] Subsequently, 5 ul of each PCR reaction is run on an agarose gel to confirm PCR product of the appropriate size. The PCR product is purified from the remaining PCR reaction using a Zymoclean gel DNA recovery kit according to the manufacturer's instructions and eluted in 30 ul nuclease free water.

[1563] For the second round of PCR, 1 ul purified PCR product from round 1 is used as template, in 4×50 ul PCR reactions as described above except with 0.2 ul of primers SR33 and SR34. Cycle conditions are the same as noted above for the first PCR reaction. The PCR product run on an agarose gel to verify amplification, purified, and eluted in 30 ul as described above.

[1564] For the third round of PCR, 1 ul of purified PCR product from round 2 is used as template in 4×50 ul PCR reactions as described except with primer SR43 and SR44. Cycle conditions are the same as described for rounds 1 and 2. Amplification is verified, the PCR product purified, and eluted as described above. The concentration and purity is measured using a spectrophotometer. The resulting linear DNA fragment, which contains 92 bp homologous to upstream of thyA, the chloramphenicol cassette flanked by frt sites, and 98 bp homologous to downstream of the thyA gene, is transformed into a E. coli Nissle 1917 strain containing pKD46 grown for recombineering. Following electroporation, 1 ml SOC medium containing 3 mM thymidine is added, and cells are allowed to recover at 37 C for 2h with shaking. Cells are then pelleted at 10,000×g for 1 minute, the supernatant is discarded, and the cell pellet is resuspended in 100 ul LB containing 3 mM thymidine and spread on LB agar plates containing 3 mM thy and 20 ug/ml chloramphenicol. Cells are incubated at 37 C overnight. Colonies that appeared on LB plates are restreaked. + cam 20 ug/ml + or − thy 3 mM. (thyA auxotrophs will only grow in media supplemented with thy 3 mM).

[1565] Next, the antibiotic resistance is removed with pCP20 transformation. pCP20 has the yeast Flp recombinase gene, FLP, chloramphenicol and ampicillin resistant genes, and temperature sensitive replication. Bacteria are grown in LB media containing the selecting antibiotic at 37° C. until OD600=0.4-0.6. 1 mL of cells are ished as follows: cells are pelleted at 16,000×g for 1 minute. The supernatant is discarded and the pellet is resuspended in 1 mL ice-cold 10% glycerol. This step is repeated 3× times. The final pellet is resuspended in 70 ul ice-cold 10% glycerol. Next, cells are electroporated with 1 ng pCP20 plasmid DNA, and 1 mL SOC supplemented with 3 mM thymidine is immediately added to the cuvette. Cells are resuspended and transferred to a culture tube and grown at 30° C. for 1 hours. Cells are then pelleted at 10,000×g for 1 minute, the supernatant is discarded, and the cell pellet is resuspended in 100 ul LB containing 3 mM thymidine and spread on LB agar plates containing 3 mM thy and 100 ug/ml carbenicillin and grown at 30° C. for 16-24 hours. Next, transformants are colony purified non-selectively (no antibiotics) at 42° C.

[1566] To test the colony-purified transformants, a colony is picked from the 42° C. plate with a pipette tip and resuspended in 10 μL LB. 3 μL of the cell suspension is pipetted onto a set of 3 plates: Cam, (37° C.; tests for the presence/absence of CamR gene in the genome of the host strain), Amp, (30° C., tests for the presence/absence of AmpR from the pCP20 plasmid) and LB only (desired cells that have lost the chloramphenicol cassette and the pCP20 plasmid), 37° C. Colonies are considered cured if there is no growth in neither the Cam or Amp plate, picked, and re-streaked on an LB plate to get single colonies, and grown overnight at 37° C.

[1567] In other embodiments, similar methods are used to create other auxotrophies, including, but not limited to, dapA.

### Example 60. Generation of a DAPA Auxotroph STING Strain

[1568] To control growth in vivo and in the environment, the parental E. coli Nissle chassis was engineered to be an auxotrophic strain through a deletion of the dapA gene, encoding 4-hydroxy-tetrahydropicolinate synthase, which is essential for bacterial growth. This deletion renders the bacterium unable to synthesize diaminopimelate (DAP), thereby preventing the proper formation of bacterial cell wall unless the strain is supplemented with DAP exogenously.

[1569] For creation of the dapA deletion (ΔdapA), two rounds of PCR were performed using nested primers. For the first round of PCR, pKD3 was used as the template DNA. The primers were designed to generate a dsDNA fragment that contained homology adjacent to the dapA gene locus in the EcN chromosome and a chloramphenicol resistance gene flanked by frt sites. The primers used in the second round of PCR utilized the PCR product of the first round as template DNA. These primers contained additional homology to dapA to provide a greater length of EcN homology for recombineering. The resulting dapA knockout fragment included 68 base pairs and 70 base pairs of EcN homology, respectively, on its 5′ and 3′ end. A strain which contains pKD46, was transformed with the dapA knockout fragment by electroporation. Colonies were selected on LB agar containing chloramphenicol (30 μg/mL) and diaminopimelate (100 μg/mL) and correct recombination events were verified by PCR. pKD46 was cured from the strain by passage at 37 C.

[1570] This DAP auxotroph chassis was used to generate bacteria expressing gene sequences for the production of effectors, such as the STING agonist producing strain SYN4023.

### Example 61. Systemic Anti-Tumor Immunity: DAP-STING Elicits Abscopal Effects in Combination with an Agonistic Anti-OX40 Antibody and Results in Long-Term Immunological Memory

[1571] Positive costimulatory receptors that promoter T-cell activation include CD28, CD137 (also known as 4-1BB), and OX40 (also known as CD134 or Tumor necrosis factor receptor (TNFR) superfamily member 4). Recently, it has been shown that innate immune stimulation (for example though the Toll-Like Receptors) in combination with an agonistic OX40 antibody are capable of promoting an T cell dependent (CD4+ and CD8+ T cell dependent) abscopal effect and immunological memory (Sagiv-Barfi et al., In Situ Vaccination with a TLR9 Agonist and Anti-OX40 Antibody Leads to Tumor Regression and Induces Abscopal Responses in Murine Lymphoma; Blood 2016 128:1847; Sagiv-Barfi et al., Eradication of spontaneous malignancy by local immunotherapy Science Translation Medicine, 2018). The ability of SYN4023 (comprising plasmid-based tetracycline inducible DacA and a dapA auxotrophic mutation) to induce an abscopal effect in combination with an anti-OX40 antibody was assessed in the A20 tumor model.

[1572] To produce cells for the study, overnight cultures were used to inoculate 500 mL LB medium with antibiotic. The strains were incubated with shaking at 37 C until the culture reached the end of log phase (OD600=0.8-1.0). To harvest, cells were spun down at 5000 rpm for 20 min, media was aspirated, cells were washed with PBS, resuspended in 15% Glycerol and PBS, aliquoted and frozen at −80 C. Cells were concentration tested by serial plating.

[1573] Mice were implanted with A20 tumors (50:50 Matrigel:PBS) 2e5 cells/mouse SC into the right flank and 1e5 cells/mouse into the left flank of each animal on Day −14. On Day −3, tumor growth was monitored; when the tumors reached ˜80-100 mm³, mice (Day 0) were randomized into experimental groups (N=10 per group) for intratumor dosing as shown in Table 61.

TABLE 62
Experimental groups

| Group No | | |
|---|---|---|
| (n = 12) | Treatment | Dosing Schedule |
| 1 | Saline | 40 uL saline day 1 and 4 |
| 2 | SYN4023 (ptet-DacA; | [1e8 CFU] in 40 uL, |
| | deltaDapA; 1e8) plus | 400 ug anti-OX40 in 40 uL; |
| | anti-OX40 at 400 | 3 doses for each on d 0 3 and 7 |
| | μg per dose)]] | |

[1574] Animals were dosed with SYN4023 bacteria I.T. and OX40 antibody I.T. for 3 doses on d0, 3 and 7. Mice were dosed with 10 ug ATC (anhydrotetracycline) via intraperitoneal injection at 4 hours post dose.

[1575] Bacterial dosing was stopped for complete responders. Tumor volume was measured in both flanks, and animal health was assessed 3x/week. Results are shown in FIG. 23A-FIG. 23C and indicate that treatment of A20 tumors with SYN4023 elicits abscopal effects in combination with aOX40. No significant effect on body weight was observed (FIG. 23E). The survival, i.e., the length of time animals could remain on study without having to be removed due to tumor burden is shown in FIG. 23D.

[1576] Next, to test whether the complete regressions elicited by SYN4023 in the above study result in long lasting immunological memory, a re-challenge study was conducted with A20 and CT26 tumors. Animals with complete regression from SYN4023 treatment were used and compared to naïve age-matched mice.

[1577] Briefly, four 14 week old naïve Balb/c females were inoculated on the left flank with 2×105 A20 cells in 50% Matrigel and on the right flank with 1×105 CT26 cells in 50% matrigel. Mice with tumor remission (n=11) from the first part of the study described above were inoculated in a similar fashion. Mice were monitored 2-3 times per week for tumor volume, body weight and health observations.

[1578] Results are depicted in FIG. 23F-H, and FIG. 23I and show that administration of SYN4023 strain results in long-term immunological memory which completely protects against the A20 re-challenge. FIG. 23F depicts the average median tumor volume for each treatment group, and FIG. 23G and FIG. 23H depict line graphs showing the tumor volumes of the individual mice over time. FIG. 23I depicts the entirety of the 2-part study querying the abcopal effect and immunological memory potential (rechallenge with A20 is depicted). In the A20 re-challenge study arm, no recurring tumors were observed in the animals previously treated with SYN4023, in contrast to the naïve controls, indicating a lasting memory response. In the CT26 re-challenge study arm, administration of SYN4023 strain partially protected from CT26 tumor growth. Out of 11 animals previously treated with SYN4023 and challenged with CT26, 9 were protected from tumor re-growth.

### Example 62. Dose Dependent Anti-Tumor Activity of SYN4449 (DAP-FNR STING) in B16.F10 Tumor Model

[1579] The Dap auxotrophic strain, constructed as described elsewhere herein, comprising a plasmid based construct expressing dacA under the control of the FNR promoter (SYN4449; ΔDAP, p15A-fnr-dacA) was assessed at various doses in the B16.F10 melanoma tumor model.

[1580] To produce cells for the study, overnight cultures were used to inoculate 500 mL LB medium with antibiotic. The strains were incubated with shaking at 37 C until the culture reached the end of log phase (OD600=0.8-1.0). To harvest, cells were spun down at 5000 rpm for 20 min, media was aspirated, cells were washed with PBS, resuspended in 15% Glycerol and PBS, aliquoted and frozen at −80 C. Cells were concentration tested by serial plating.

[1581] Mice were implanted with B16 tumors, and mice injected intratumorally with bacteria producing STING agonists at various doses and controls.

[1582] Briefly, B16 cells were implanted (2×10e5 cells/mouse in PBS) SC into the right flank of each animal on day −9. On day Day −3 tumor growth was monitored; when the tumors reached ˜50-80 mm\hat{ }3 on day 1, mice were randomized into groups (N=9 per group) for intratumor dosing as follows: Group 1—PBS (control); Group 2—SYN4449, 1e7 CFU; Group 3—SYN4449, 1e8 CFU; and Group 4-SYN4449, 1e9 CFU Animals were dosed with appropriate bacteria based on group or PBS (to control for injection) on days 1 and 4. Bacterial dosing was stopped for complete responders.

[1583] Tumor volumes at day 4, 7, 10, 12 and 15 are shown in FIGS. 26A-26D for the individual mice. Results indicate that administration of SYN4449 has a dose dependent impact on B16-F10 tumor growth and tumor rejection. At a dose of 1e9 (FIG. 26D), this treatment results in the largest percentage of rejections and significant control of tumor growth over this time period.

### Example 63. SYN4449 Dose Response in A20 Tumor Model

[1584] To determine in vivo activity and efficacy of SYN4449 (comprising FNR-dacA, delta dapA (ΔDAP, p15A-fnr-dacA)), over time at three different doses and compared to PBS control in the A20 tumor model (B-cell lymphoma model).

[1585] To produce cells for the study, overnight cultures were used to inoculate 500 mL LB medium with antibiotic. The strains were incubated with shaking at 37 C until the culture reached the end of log phase (OD600=0.8-1.0). To harvest, cells were spun down at 5000 rpm for 20 min, media was aspirated, cells were washed with PBS, resuspended in 15% Glycerol and PBS, aliquoted and frozen at −80 C. Cells were concentration tested by serial plating.

[1586] Female Balb/c mice 6 weeks of age were implanted with A20 tumors, injected intratumorally with three different doses of bacteria producing enzymes capable of producing c-diAMP. Tumor volumes were measured at various time points.

[1587] Briefly, A20 cells were implanted (2×10 5/mouse/100 μL, in PBS) SC into the right flank of each animal on day −15. Tumor growth was monitored until the tumors reached ˜60-80 mm\hat{ }3. On day 0, mice were randomized into groups (N=10 per group) for intratumor dosing as follows: PBS (group 1, vehicle control), SYN4449 (group 2, 1e6 CFU), SYN4449 (group 3, 1e7 CFU), and SYN4449 (group 4, 1e8 CFU). Animals were dosed with appropriate bacteria based on group or PBS (to control for injection) on day 0, 3 and 7. Tumor volumes and body weights were recorded three times in a week with a gap of 1-2 days in between two measurements for 30 days. Results are shown in FIGS. 27A-27D indicate that administration of SYN4449 drives dose-dependent tumor control in A20 lymphoma model, with SYN4449 at 1e6 (FIG. 27A), 1e7 (FIG. 27B), and 1e8 CFU (FIG. 27C) resulting in 5 out of 10 complete responses, 6 out of 10 complete responses and 6 out of 10 complete responses, respectively.

### Example 64. Construction and Activity of a STING Agonist Producing Strains Under Control of a Low Oxygen Promoter

[1588] To generate a STING agonist producing strain which is induced under low oxygen conditions, e.g., as exist in the tumor microenvironment, dacA from Listeria monocytogenes was cloned into a low copy plasmid under control of an FNR inducible promoter and transformed into a Nissle strain which further comprises a deletion in DapA to generate SYN4449 (ΔDAP, 15A-fnr-dacA).

[1589] To measure in vitro activity of SYN4449, overnight cultures of SYN4449 and wild type control were grown in 2YT (supplemented with diaminopimelic acid) at 37 C, shaking at 250 rpm. Cultures were back diluted 1:100 (10 mL in 125 mL baffled flask) and grown for 2-3 hours to early log phase. Once cultures reached early log, cultures were moved into a Coy anaerobic chamber supplying an anaerobic atmosphere (85% N2, 10% CO2, 5% H2). Cultures were incubated anaerobically for 3-4 hours or shaked at 37 C, 250 rpm overnight in tubes to allow for induction of dacA. Next, samples were centrifuged for 5 minutes at 10000×g to separate cellular and extracellular fractions. Cell pellets were then used to determine intracellular cyclic-di-AMP. Concentrations were determined via LC/MS as described herein. Results are shown in FIG. 28A, and show that SYN4449 can produce c-di-AMP in vitro under control of the FNR promoter.

### Example 65. Construction of Various STING Agonist Producing Strains Under Control of a Low Oxygen Promoter

[1590] Next, strains which comprise an integrated copy of FNR-DacA and/or human cGAS were constructed. Examples are listed in Table 63. Strains were constructed with dapA and/or ThyA auxotrophies, strains with both dacA and kynurenine consumption circuits were designed, and in some instances, E. coli Nissle prophage 3 was disrupted using methods described herein and known in the art.

TABLE 63
Experimental groups

| | | |
|---|---|---|
| 1 | SYN4910 | ΔΦ, ΔDAP, ΔThyA, HA9/10::fnr-DacA |
| 2 | SYN4739 | ΔThyA, HA9/10::fnr-DacA, HA3/4::PSynJ23119- |
| | | pKYNase, ATrpE |
| 3 | SYN4789 | ΔThyA, HA9/10::fnr-DacA, HA3/4::PSynJ23119- |
| | | pKYNase, ATrpE |
| 4 | SYN4737 | ΔΦ, ΔDAP, HA9/10::fnr-DacA |
| 5 | SYN4939 | ΔΦ, ΔDAP, ΔThyA, HA9/10::fnr-DacA, |
| | | PSynJ23119-pKYNase, ATrpE |
| 6 | | HA1/2::fnr-hcGAS |
| 7 | SYN5113 | ΔΦ, ΔDAP, ΔThyA, HA1/2::fnr-hcGAS |
| | | ΔΦ, ΔDAP, ΔThyA, HA9/10::fnr-DacA, |
| | | HA1/2::fnr-hcGAS |
| | | ΔΦ, ΔDAP, ΔthyA, HA9/10::fnr-DacA, |
| | | PsynJ23119-pKYNase, AtrpE,, HA1/2::fnr-hcGAS |

[1591] In order to generate the strains in Table 63, the methods described herein and known in the art were used in varying sequence. For example, SYN4910 was built from a Nissle strain that was wild type except for a phage3 knockout by adding DapA knockout, a HA910-FNR-dacA knockin and then a thyA knockout. In another example, SYN4939 was built from SYN2306 (a strain which comprises integrated kynureninase under control of a constitutive promoter) by adding a thyA knockout, HA910-FNR-dacA knockin, a dap knockout and a phage knockout.

### A. Chromosomal Integration of DacA

[1592] To generate strains comprising chromosomally integrated DacA under the control of the FNR promoter, dacA from Listeria monocytogenes was cloned into a KIKO vector under the control of the FNR promoter (SEQ ID NO: 1281). Knock-in PCR products were made from the KIKO vectors and allelic exchange was performed to integrate these operons into E. coli Nissle genome at the HA910 site.

[1593] Allelic exchange was facilitated through use of the lambda red recombinase system as described herein and in PCT/US2017/013072, filed Jan. 11, 2017, the contents of which is herein incorporated by reference in its entirety. The lambda red system is described in Datsenko and Wanner (One-step inactivation of chromosomal genes in Escherichia coli K-12 using PCR products; PNAS Jun. 6, 2000. 97 (12) 6640-6645) and modifications and adaptations thereof are also described in the art.

### B. Generation of a Phage 3 Knockout

[1594] Bioinformatic approaches helped identify 3 regions of the genome putatively containing active phage (as described in International Patent Application PCT/US18/38840, filed Jun. 21, 2018, the contents of which is herein incorporated by references in its entirety). Using an in-house developed PCR method, it was shown that the active phage originated from a genomic locus between bases 2,035,867 and 2,079,177 of the E. coli Nissle genome.

[1595] To inactivate the phage, lambda red recombineering was used to make a 9,687 base pair deletion. First, primers were designed and synthesized to amplify a chloramphenicol acetyltransferase (CAT) gene flanked by flippase recognition sites (FRT) from the plasmid pKD3. When introduced into Nissle, this cassette provides resistance to the antibiotic chloramphenicol. In addition, these primers contain 60 base pairs of homology to the genome which directs the antibiotic cassette into the Phage loci. The Phage3 KO FWD and Phage3 KO REV primers were used to PCR amplify a 1178 base pair linear DNA fragment, which was PCR purified. The resulting DNA template was used in recombineering.

[1596] To prepare for deletion of phage, first the lambda red system was introduced, by transforming a pKD46 plasmid comprising the lambda red genes into the E. coli Nissle host strain (wild type or comprising further engineered components) by electroporation as known in the art. The cells were spread out on a selective media plates and incubated overnight at 30° C. Next, the recombineering construct was transformed into the E. coli Nissle strain comprising pKD46 by electroporation. The transformed cells were spread out on an LB plate containing 35 μg/mL chloramphenicol and incubated overnight. The presence of the mutation was verified by colony PCR. The PCR product only forms if the CAT gene has inserted into the genome (thereby deleting and inactivating the Phage).

[1597] The antibiotic resistance gene was removed with the plasmid pCP20. Plasmid pCP20 is a temperature-sensitive plasmid that expresses the Flippase recombinase that will recombine the FRT-sites thereby removing the CAT gene. The strain with deleted phage sequence was grown in LB media containing antibiotics at 37° C. until it reached an OD600 of 0.4-0.6 and then transformed with pCP20 using electroporation. 200 ul of cells were spread on carbenicillin plates, 200 μL of cells were spread on chloramphenicol plates, and both were grown at 37° C. overnight. The carbenicillin plate contain cells with pCP20. The chloramphenicol plate provides an indication of how many cells survived the electroporation. Transformants from the carbenicillin plate were purified non-selectively at 43° C. and allowed to grow overnight.

[1598] The purified transformants were tested for sensitivity to carbenicillin and chloramphenicol. If no growth was observed on the chloramphenicol or carbenicillin plates for a colony, then both the CAT gene and the pCP20 plasmid were lost, and the colony was saved for further analysis. The saved colonies were restreaked onto an LB plate to obtain single colonies and grown overnight at 37° C. The deletion of the phage sequence was confirmed by sequencing the phage loci region of the genome and by phenotypically verifying the absence of plaque formation (essentially following the protocol as described in (as described in International Patent Application PCT/US18/38840, filed Jun. 21, 2018, the contents of which is herein incorporated by references in its entirety).

[1599] An alternative method of performing knockout such as phage KO is to use loxP recognition site instead of FRT and pCRE plasmid instead of pCP20. In this case, first, primers were designed and synthesized to amplify an aminoglycoside phosphotransferase (NeoR/KanR) gene flanked by flippase recognition sites (loxP) from the plasmid pKD4-loxP (SEQ ID NO: 1442). When introduced into Nissle, this cassette provides resistance to the antibiotic kanamycin. In addition, these primers contain 60 base pairs of homology to the genome which directs the antibiotic cassette into the Phage loci. The primers were used to PCR amplify a 1178 base pair linear DNA fragment, which was PCR purified. The resulting DNA template was used in recombineering.

[1600] To prepare for deletion of phage, first the lambda red system was introduced, by transforming a pKD46 plasmid comprising the lambda red genes into the E. coli Nissle host strain (wild type or comprising further engineered components) by electroporation as known in the art. The cells were spread out on a selective media plates and incubated overnight at 30° C. Next, the recombineering construct was transformed into the E. coli Nissle strain comprising pKD46 by electroporation. The transformed cells were spread out on an LB plate containing 50 μg/mL kanamycin and incubated overnight. The presence of the mutation was verified by colony PCR. The PCR product only forms if the CAT gene has inserted into the genome (thereby deleting and inactivating the Phage).

[1601] The antibiotic resistance gene was removed with the plasmid pKD4-loxP. Plasmid pKD4-loxP is an altered pKD4, in which the FRT sites are replaced by loxP sites, a temperature-sensitive plasmid that expresses the flippase recombinase that will recombine the loxP-sites thereby removing the NeoR/KanR gene. The strain with deleted phage sequence was grown in LB media containing antibiotics at 37° C. until it reached an OD600 of 0.4-0.6 and then transformed with logic1253 using electroporation. 200 ul of cells were spread on carbenicillin plates, 200 μL of cells were spread on kanamycin plates, and both were grown at 37° C. overnight. The carbenicillin plate contain cells with pKD4-loxP. The kanamycin plate provides an indication of how many cells survived the electroporation. Transformants from the carbenicillin plate were purified non-selectively at 43° C. and allowed to grow overnight.

[1602] The purified transformants were tested for sensitivity to carbenicillin and kanamycin. If no growth was observed on the kanamycin or carbenicillin plates for a colony, then both the NeoR/KanR gene and the pKD4-loxP plasmid were lost, and the colony was saved for further analysis. The saved colonies were restreaked onto an LB plate to obtain single colonies and grown overnight at 37° C. The deletion of the phage sequence was confirmed by PCR amplification of an expected, 640-bp fragment using primers (GTGATTAAGTACGTGAAATCGACTGAAC (SEQ ID NO: 1436) and CTCTGTCGGCAACATGAGGA (SEQ ID NO: 1437)) which flank the phage-deletion site.

[1603] Table 64. lists the Phage 3 genes that were inactivated by the deletion.

TABLE 64
Phage 3 Genes inactivated by the deletion

| | | | |
|---|---|---|---|
| ECOLIN_10110 | 1 . . . 160 | Minor tail protein U | GI: 660512026 |
| ECOLIN_10115 | 157 . . . 729 | tail protein | GI: 660512027 |
| ECOLIN_10120 | 745 . . . 987 | DNA breaking- | GI: 660512028 |
| | | rejoining protein | |
| ECOLIN_10125 | 1013 . . . 1339 | hypothetical protein | GI: 660512029 |
| ECOLIN_10130 | 1422 . . . 3368 | peptidase S14 | GI: 660512030 |
| ECOLIN_10135 | 3382 . . . 4881 | capsid protein | GI: 660512031 |
| ECOLIN_10140 | 4878 . . . 5093 | hypothetical protein | GI: 660512032 |
| ECOLIN_10145 | 5090 . . . 7192 | DNA packaging | GI: 660512033 |
| | | protein | |
| ECOLIN_10150 | 7192 . . . 7680 | terminase | GI: 660512034 |
| ECOLIN_10160 | 7864 . . . 8592 | hypothetical protein | GI: 660512035 |
| ECOLIN_10165 | 8767 . . . 8997 | hypothetical protein | GI: 660512036 |
| ECOLIN_10170 | 8996 . . . 9592 | hypothetical protein | GI: 660512037 |
| ECOLIN_10175 | 9661 . . . 9687 | hypothetical protein | GI: 660512038 |

C. Generation of a ThyA Auxotroph (ΔthyA) STING Agonist Producing Strain

[1604] Mutation of the thyA gene in E. coli Nissle yields a strain that cannot form a colony on LB plates unless they are supplemented with thymidine. A thyA::cam PCR fragment was amplified using 3 rounds of PCR with nested primers. For the first PCR round, pKD3 was used as template. The PCR product was purified from the remaining PCR reaction and used as template in the second PCR reaction. Again, the resulting PCR product was purified, and used as template in a third round of PCR. The resulting linear DNA fragment, which contained 92 bp homologous to upstream of thyA, the chloramphenicol cassette flanked by frt sites, and 98 bp homologous to downstream of the thyA gene, was transformed into a E. coli Nissle 1917 strain containing pKD46 grown for recombineering using electroporation. Colonies were selected on LB agar containing chloramphenicol (30 μg/mL) and thymidine (3 mM) and correct recombination events were verified by PCR. pKD46 was cured from the strain by passage at 37 C.

[1605] Next, the antibiotic resistance was removed with pCP20 transformation and cells were spread on LB agar plates containing 3 mM thymidine and 100 ug/ml carbenicillin and grown at 30° C. for 16-24 hours. Next, transformants were colony purified non-selectively (no antibiotics) at 42° C. To test the colony-purified transformants, a colonies were plated on Cam, Amp, and LB only plates and colonies were considered cured if there was no growth on the Cam or Amp plates. Absence of antibiotic cassettes was confirmed by PCR.

### D. Generation of a DAPA Auxotroph STING Strain

[1606] For creation of the dapA deletion (ΔdapA), two rounds of PCR were performed using nested primers. For the first round of PCR, pKD3 was used as the template DNA. The primers were designed to generate a dsDNA fragment that contained homology adjacent to the dapA gene locus in the EcN chromosome and a chloramphenicol resistance gene flanked by frt sites. The primers used in the second round of PCR utilized the PCR product of the first round as template DNA. These primers contained additional homology to dapA to provide a greater length of EcN homology for recombineering. The resulting dapA knockout fragment included 68 base pairs and 70 base pairs of EcN homology, respectively, on its 5′ and 3′ end. A strain which contains pKD46, was transformed with the dapA knockout fragment by electroporation. Colonies were selected on LB agar containing chloramphenicol (30 μg/mL) and diaminopimelate (100 μg/mL) and correct recombination events were verified by PCR. pKD46 was cured from the strain by passage at 37 C.

### Example 66. Construction and Activity of Various STING Agonist Producing Strains Under Control of a Low Oxygen Promoter

### Testing of Strains Comprising a Double Auxotrophy and a Phage Knockout

[1607] Strains comprising FNR-DacA and comprising a double auxotrophy and phage knockout, SYN4910 (ΔΦ, ΔDAP, ΔThyA, HA9/10::fnr-DacA) and combination strain SYN4939 (Nissle, ΔDAP, ΔThyA, HA9/10::fnr-DacA, PSynJ23119-pKYNase, ΔTrpE), were constructed according to methods described herein.

[1608] To measure compare in vitro activity of SYN4910 and SYN4939, overnight cultures of each strain including a Nissle control (SYN94, streptomycin resistant Nissle) were grown in LB at 37 C, shaking at 250 rpm. Cultures were back diluted 1:100 (10 mL in 125 mL baffled flask) and grown for 2-3 hours to early log phase. Once cultures reached early log, cultures were moved into a Coy anaerobic chamber supplying an anaerobic atmosphere (85% N2, 10% CO2, 5% H2). Cultures were incubated anaerobically for 3-4 hours or shaked at 37 C, 250 rpm overnight in a tube to allow for induction of the dacA gene.

[1609] Next, cultures were removed for LC/MS analysis of cyclic dinucleotide production. Samples were centrifuged for 5 minutes at 10000×g to separate cellular and extracellular fractions. Cell pellets were then used to determine intracellular cyclic-di-AMP. Concentrations were determined via LC/MS as described herein.

[1610] For quantifying kynurenine consumption, the LB overnight cultures SYN4910 and SYN4939 plus kynurenine consuming strain SYN2306 (comprising HA3/4::PSynJ23119-pKYNase delta TrpE) and Nissle control (SYN94) were diluted 1:25 in M9 minimal media supplemented with 0.5% glucose (w/v) and appropriate antibiotics or LB and antibiotics and grown shaking (250 rpm) at 37° C. for 5-6 hours. Cells were spun down and resuspended in LB with 200 μM L-kynurenine (Sigma-Aldrich®) to an optical density (600 nm) of 1.0. These cultures were then incubated at 37° C. with shaking for 3-4 hours to allow consumption of kynurenine. For kynurenine consumption measurements, samples were removed from each culture and spun for 5 minutes at 10000×g to separate the cellular and extracellular fractions. Media supernatant was removed and used to determine consumption of kynurenine via LC/MS analysis.

[1611] Results shown in FIG. 28B and FIG. 28C indicate both SYN4910 and SYN4939 were to produce cyclic-di-AMP. Results of FIG. 28D indicate that the combination strain SYN4939 also retained the ability to consume kynurenine similarly to it's parent SYN2306. Taken together, these results indicate that these strains comprising phage knockout and double auxotrophies maintain the ability of in vitro cyclic-di-AMP production and that the combination strain SYN4939 possesses the ability to both produce cyclic-di-AMP and consume kynurenine.

[1612] Testing of the effect of phage knockout and dapA auxotrophy on strain activity

[1613] To test the effect of phage knockout and dapA auxotrophy on strain activity, strains with and without phage knockout and dapA knockout, SYN4739 (Nissle HA3/4::PSynJ23119-pKYNase, ΔTrpE, ΔThyA, HA9/10::fnr-DacA) and SYN4939 (Nissle, ΔΦ, ΔDAP, ΔThyA, HA9/10::fnr-DacA, PSynJ23119-pKYNase, ΔTrpE), were compared side by side. Strains were grown essentially as described above assessed for c-di-AMP production and kynurenine consumption.

[1614] Cyclic-di-AMP production for both strains is shown in FIG. 29A and FIG. 29B. Kynurenine production as compared to kynurenine consumer single circuit strains SYN2028 and SYN2306 are shown in FIG. 29C and FIG. 29D Similar results can be seen in FIG. 30 and FIG. 31. SYN4787 essentially comprises the same circuitry as SYN4739 (Nissle ΔThyA, HA9/10::fnr-DacA, HA3/4::PSynJ23119-pKYNase, ΔTrpE) but does not any antibiotic markers (SYN4739 has kanamycin resistance). Taken together, these results indicate that the phage and dapA knockouts do not affect the activity of the strains in vitro.

### Example 67. Phage Testing Protocol: Plaque Assay of Bacterial Virus from Escherichia coli Using Mitomycin C Induction Data Analysis

[1615] The cell lines were analyzed for the production of phage using the mitomycin C phage induction procedure (Method STM-V-708, Plaque Assay of Bacterial Virus from Escherichia coli (E. coli). Using Mitomycin C Induction, as described in Sinsheimer RL. Purification and Properties of Bacteriophage X174. J. Mol. Biol. 1959; 1:37-42, and Clowes, R C and Hayes, W. Experiments in microbial genetics. John Wiley & Sons, N Y. 1968, the contents of each of which is herein incorporated by reference in its entireties). Briefly, sample (with thymidine supplemented media to support cell expansion, as appropriate) and control cells were grown overnight. A portion of the sample, positive control (E. coli, EMG 2: K (lambda), ATCC 23716, or equivalent) and negative control (E. coli, ATCC 13706, or equivalent) were removed and centrifuged, and each supernatant examined in a plaque assay for the presence of bacteriophage. Mitomycin C, at a final concentration of 2 ng/mL, was added to the remaining sample, positive and negative bacterial cultures. The cultures were then placed at 37±2° C. and shaken at 300-400 RPM until lysis occurred in the positive control (−4.5 hours). Each culture was treated with chloroform, centrifuged, and a 0.1 mL aliquot of the supernatant was examined for the presence of bacteriophage. To accomplish this, supernatants were mixed with phage-sensitive E. coli strain ATCC 13706, mixed with 0.7% agarose solution, and plated as a lawn atop lysogeny broth (LB) agar. The test was considered valid if plaques were present in the positive control and no plaques were present in the negative control.

### Example 68. Functional Assay for c-Di-AMP Produced by SYN4737

[1616] Next, a functional assay was performed to further confirm the activity of SYN4737 (delta Phage, delta Dap, HA9/10::FNR-dacA). The ability of SYN4737 to activate the STING pathway in antigen presenting cell populations was assessed. Bacteria (WT Nissle or SYN4737) were co-cultured at various multiplicities of infection (MOI) with 0.5×106 RAW 264.7 cells (immortalized murine macrophage cell line). SYN4737 was incubated shaking at 37 C, 250 rpm for 1 hour and induced for 4-5 hours in the anaerobe chamber prior to the experiment. Co-cultures were incubated for 4 hours as indicated and protein extracts were analyzed for IFNβ1 production. FIG. 32 shows that SYN4737, but not WT Nissle is able to induce IFNβ1 production in a manner dependent on the MOI.

1. A modified microorganism capable of producing at least one immune initiator and at least one immune sustainer.

2. The modified microorganism of claim 1, wherein the immune initiator is capable of enhancing oncolysis, activating antigen presenting cells (APCs), and/or priming and activating T cells.

3. The modified microorganism of claim 1 or claim 2, wherein the immune initiator is a therapeutic molecule encoded by at least one gene; a therapeutic molecule produced by an enzyme encoded by at least one gene; at least one enzyme of a biosynthetic or catabolic pathway encoded by at least one gene; at least one therapeutic molecule produced by at least one enzyme of a biosynthetic or catabolic pathway encoded by at least one gene; or a nucleic acid molecule that mediates RNA interference, microRNA response or inhibition, TLR response, antisense gene regulation, target protein binding, or gene editing.

4. The modified microorganism of any one of claims 1-3, wherein the immune initiator is a cytokine, a chemokine, a single chain antibody, a ligand, a metabolic converter, a T cell co-stimulatory receptor, a T cell co-stimulatory receptor ligand, an engineered chemotherapy, or a lytic peptide.

5. The modified microorganism of any one of claims 1-4, wherein the immune initiator is a STING agonist, arginine, 5-FU, TNFα, IFNγ, IFNβ1, agonistic anti-CD40 antibody, CD40L, SIRPα, GMCSF, agonistic anti-OXO40 antibody, OXO40L, agonistic anti-4-1BB antibody, 4-1BBL, agonistic anti-GITR antibody, GITRL, anti-PD1 antibody, anti-PDL1 antibody, or azurin.

6. The modified microorganism of claim 5, wherein the immune initiator is a STING agonist.

7. The modified microorganism of claim 6, wherein the STING agonist is c-diAMP, c-GAMP, or c-diGMP.

8. The modified microorganism of any one of claims 5-7, wherein the modified microorganism comprises at least one gene sequence encoding an enzyme which produces the immune initiator.

9. The modified microorganism of claim 8, wherein the at least one gene sequence encoding the immune initiator is a dacA gene sequence.

10. The modified microorganism of claim 8, wherein the at least one gene sequence encoding the immune initiator is a cGAS gene sequence.

11. The modified microorganism of claim 10, wherein the cGAS gene sequence is selected from a human cGAS gene sequence, a Verminephrobacter eiseniae cGAS gene sequence, Kingella denitrificans cGAS gene sequence, and a Neisseria bacilliformis cGAS gene sequence.

12. The modified microorganism of any one of claims 8-11, wherein the at least one gene sequence encoding the immune initiator is integrated into a chromosome of the modified microorganism or is present on a plasmid.

13. The modified microorganism of any one of claims 8-11, wherein the at least one gene sequence encoding the immune initiator is operably linked to an inducible promoter.

14. The modified microorganism of claim 13, wherein the inducible promoter is induced by low oxygen, anaerobic, or hypoxic conditions.

15. The modified microorganism of claim 5, wherein the immune initiator is arginine.

16. The modified microorganism of claim 15, wherein the microorganism comprises at least one gene sequence encoding at least one enzyme of the arginine biosynthetic pathway.

17. The modified microorganism of claim 15, wherein the at least one gene sequence encoding the at least one enzyme of the arginine biosynthetic pathway comprises feedback resistant argA.

18. The modified microorganism of claim 16, wherein the at least one gene sequence encoding the at least one enzyme of the arginine biosynthetic pathway is selected from the group consisting of: argA, argB, argC, argD, argE, argF, argG, argH, argI, argJ, carA, and carB.

19. The modified microorganism of claim 17 or claim 18, further comprising a deletion or a mutation in an arginine repressor gene (argR).

20. The modified microorganism of any one of claims 16-19, wherein the at least one gene sequence for the production of arginine is integrated into a chromosome of the modified microorganism or is present on a plasmid.

21. The modified microorganism of any one of claims 16-20, wherein the at least one gene sequence for the production of arginine is operably linked to an inducible promoter.

22. The modified microorganism of claim 21, wherein the inducible promoter is induced by low oxygen, anaerobic, or hypoxic conditions.

23. The modified microorganism of claim 5, wherein the immune initiator is 5-FU.

24. The modified microorganism of claim 23, wherein the microorganism comprises at least one gene sequence encoding an enzyme capable of converting 5-FC to 5-FU.

25. The modified microorganism of claim 24, wherein the at least one gene sequence is codA.

26. The modified microorganism of claim 24 or claim 25, wherein the at least one gene sequence is integrated into a chromosome of the modified microorganism or is present on a plasmid.

27. The modified microorganism of any one of claims 24-26, wherein the at least one gene sequence encoding the immune initiator is operably linked to an inducible promoter.

28. The modified microorganism of claim 27, wherein the inducible promoter is induced by low oxygen, anaerobic, or hypoxic conditions.

29. The modified microorganism of claim 1, wherein the immune sustainer is capable of enhancing trafficking and infiltration of T cells, enhancing recognition of cancer cells by T cells, enhancing effector T cell response, and/or overcoming immune suppression.

30. The modified microorganism of claim 1 or claim 29, wherein the immune sustainer is a therapeutic molecule encoded by at least one gene; a therapeutic molecule produced by an enzyme encoded by at least one gene; at least one enzyme of a biosynthetic or catabolic pathway encoded by at least one gene; at least one therapeutic molecule produced by at least one enzyme of a biosynthetic or catabolic pathway encoded by at least one gene; or a nucleic acid molecule that mediates RNA interference, microRNA response or inhibition, TLR response, antisense gene regulation, target protein binding, or gene editing.

31. The modified microorganism of any one of claim 1, 29, or 30, wherein the immune sustainer is a cytokine, a chemokine, a single chain antibody, a ligand, a metabolic converter, a T cell co-stimulatory receptor, or a T cell co-stimulatory receptor ligand.

32. The modified microorganism of any one of claim 1 or 29-31, wherein the immune sustainer is a metabolic converter, arginine, a STING agonist, CXCL9, CXCL10, anti-PD1 antibody, anti-PDL1 antibody, anti-CTLA4 antibody, agonistic anti-GITR antibody or GITRL, agonistic anti-OX40 antibody or OX40L, agonistic anti-4-1BB antibody or 4-1BBL, IL-15, IL-15 sushi, IFNγ, or IL-12.

33. The modified microorganism of claim 32, wherein the immune sustainer is a metabolic converter.

34. The modified microorganism of claim 33, wherein the metabolic converter is at least one enzyme of a kynurenine consumption pathway or at least one enzyme of an adenosine consumption pathway.

35. The modified microorganism of claim 33 or claim 34, wherein the microorganism comprises at least one gene sequence encoding the at least one enzyme of the kynurenine consumption pathway.

36. The modified microorganism of claim 35, wherein the at least one gene sequence encoding the at least one enzyme of the kynurenine consumption pathway is a kynureninase gene sequence.

37. The modified microorganism of claim 36, wherein the at least one gene sequence is kynU.

38. The modified microorganism of claim 37, wherein the at least one gene sequence is operably linked to a constitutive promoter.

39. The modified microorganism of any one of claims 35-38, wherein the at least one gene sequence encoding the at least one enzyme of the kynurenine consumption pathway is integrated into a chromosome of the microorganism or is present on a plasmid.

40. The modified microorganism of any one of claims 35-39, wherein the microorganism comprises a deletion or a mutation in trpE.

41. The modified microorganism of claim 32 or claim 33, wherein the microorganism comprises at least one gene sequence encoding at least one enzyme of an adenosine consumption pathway.

42. The modified microorganism of claim 41, wherein the at least one gene sequence encoding the at least one enzyme of the adenosine consumption pathway is selected from add, xapA, deoD, xdhA, xdhB, and xdhC.

43. The modified microorganism of claim 42, wherein the at least one gene sequence encoding the at least one enzyme of the adenosine consumption pathway is operably linked to a promoter induced by low oxygen, anaerobic, or hypoxic conditions.

44. The modified microorganism of any one of claims 41-43, wherein the at least one gene sequence encoding the at least one enzyme of the adenosine consumption pathway is integrated into a chromosome of the microorganism or is present on a plasmid.

45. The modified microorganism of any one of claims 41-44, wherein the modified microorganism comprises at least one gene sequence encoding an enzyme for importing adenosine into the microorganism.

46. The modified microorganism of claim 45, wherein the at least one gene sequence encoding the enzyme for importing adenosine into the microorganism is nupC or nupG.

47. The modified microorganism of claim 32 or claim 33, immune sustainer is arginine.

48. The modified microorganism of claim 47, wherein the microorganism comprises at least one gene sequence encoding at least one enzyme of the arginine biosynthetic pathway.

49. The modified microorganism of claim 48, wherein the at least one enzyme of the arginine biosynthetic pathway comprises feedback resistant argA.

50. The modified microorganism of claim 48 or claim 49, wherein the at least one gene sequence encoding the at least one enzyme of the arginine biosynthetic pathway is selected from the group consisting of: argA, argB, argC, argD, argE, argF, argG, argH, argI, argJ, carA, and carB.

51. The modified microorganism of any one of claims 48-50, wherein the at least one gene sequence encoding the at least one enzyme of the arginine biosynthetic pathway is operably linked to a promoter induced by low oxygen, anaerobic, or hypoxic conditions.

52. The modified microorganism of any one of claims 48-51, wherein the at least one gene sequence encoding the at least one enzyme of the arginine biosynthetic pathway is integrated into a chromosome of the modified microorganism or is present on a plasmid.

53. The modified microorganism of any one of claims 47-52, further comprising a deletion or a mutation in an arginine repressor gene (argR).

54. The modified microorganism of claim 32 or claim 33, wherein the immune sustainer is a STING agonist.

55. The modified microorganism of claim 54, wherein the STING agonist is c-diAMP, c-GAMP, or c-diGMP.

56. The modified microorganism of any one of claims 54-55, wherein the modified microorganism comprises at least one gene sequence encoding an enzyme which produces the STING agonist.

57. The modified microorganism of claim 56, wherein the at least one gene sequence encoding the immune sustainer is a dacA gene sequence.

58. The modified microorganism of claim 56, wherein the at least one gene sequence encoding the immune sustainer is a cGAS gene sequence.

59. The modified microorganism of claim 58, wherein the cGAS gene sequence is selected from a human cGAS gene sequence, a Verminephrobacter eiseniae cGAS gene sequence, Kingella denitrificans cGAS gene sequence, and a Neisseria bacilliformis cGAS gene sequence.

60. The modified microorganism of any one of the previous claims, wherein the modified microorganism is a bacterium or a yeast.

61. The modified microorganism of any one of the previous claims, wherein the modified microorganism is an E. coli bacterium.

62. The modified microorganism of any one of the previous claims, wherein the modified microorganism is an E. coli Nissle bacterium.

63. The modified microorganism of any one of the previous claims, wherein the modified microorganism comprises at least one mutation or deletion in a gene which results in one or more auxotrophies.

64. The modified microorganism of claim 63, wherein the at least one deletion or mutation is in a dapA gene and/or a thyA gene.

65. The modified microorganism of any one of the previous claims, comprising a phage deletion.

66. A composition comprising at least one modified microorganism capable of producing an immune initiator, and an immune sustainer.

67. The composition of claim 66, wherein the at least one modified microorganism is capable of producing the immune intiator and the immune sustainer.

68. The composition of claim 66, wherein the at least one modified microorganism is capable of producing the immune initiator, and at least a second modified microorganism is capable of producing the immune sustainer.

69. The composition of claim 66, wherein the immune sustainer is not produced by a modified microorganism in the composition.

70. A composition comprising at least one modified microorganism capable of producing an immune sustainer, and an immune initiator.

71. The composition of claim 70, wherein the at least one modified microorganism is capable of producing the immune initiator and the immune sustainer.

72. The composition of claim 70, wherein the at least one modified microorganism is capable of producing the immune sustainer, and at least a second modified microorganism is capable of producing the immune intiator.

73. The composition of claim 70, wherein the immune initiator is not produced by a modified microorganism in the composition.

74. A pharmaceutically acceptable composition comprising the modified microorganism of any one of claims 1-65 or the composition of any one of claims 66-73, and a pharmaceutically acceptable carrier.

75. The pharmaceutically acceptable composition of claim 74, wherein the composition is formulated for intratumoral administration.

76. A kit comprising the pharmaceutically acceptable composition of claim 74 or claim 75, and instructions for use thereof.

77. A method of treating cancer in a subject, the method comprising administering to the subject the pharmaceutically acceptable composition of claim 74 or claim 75, thereby treating cancer in the subject.

78. A method of inducing and sustaining an immune response in a subject, the method comprising administering to the subject the pharmaceutically acceptable composition of claim 74 or claim 75, thereby inducing and sustaining the immune response in the subject.

79. A method of inducing an abscopal effect in a subject having a tumor, the method comprising administering to the subject the pharmaceutically acceptable composition of claim 74 or claim 75, thereby inducing the abscopal effect in the subject.

80. A method of inducing immunological memory in a subject having a tumor, the method comprising administering to the subject the pharmaceutically acceptable composition of claim 74 or claim 75, thereby inducing the immunological memory in the subject.

81. A method of inducing partial regression of a tumor in a subject, the method comprising administering to the subject the pharmaceutically acceptable composition of claim 74 or claim 75, thereby inducing the partial regression of the tumor in the subject.

82. The method of claim 81, wherein the partial regression is a decrease in size of the tumor by at least about 10%, at least about 25%, at least about 50%, or at least about 75%.

83. A method of inducing complete regression of a tumor in a subject, the method comprising administering to the subject the pharmaceutically acceptable composition of claim 74 or claim 75, thereby inducing the complete regression of the tumor in the subject.

84. The method of claim 83, wherein the tumor is not detectable in the subject after administration of the pharmaceutically acceptable composition.

85. A method of treating cancer in a subject, the method comprising
administering a first modified microorganism to the subject, wherein the first modified microorganism is capable of producing an immune initiator; and
administering a second modified microorganism to the subject, wherein the second modified microorganism is capable of producing an immune sustainer,
thereby treating cancer in the subject.

86. A method of inducing and sustaining an immune response in a subject, the method comprising
administering a first modified microorganism to the subject, wherein the first modified microorganism is capable of producing an immune initiator; and
administering a second modified microorganism to the subject, wherein the second modified microorganism is capable of producing an immune sustainer,
thereby inducing and sustaining the immune response in the subject.

87. The method of claim 85 or claim 86, wherein the administering steps are performed at the same time; wherein administering of the first modified microorganism to the subject occurs before administering of the second modified microorganism to the subject; or wherein administering of the second modified microorganism to the subject occurs before administering of the first modified microorganism to the subject.

88. A method of treating cancer in a subject, the method comprising
administering a first modified microorganism to the subject, wherein the first modified microorganism is capable of producing an immune initiator; and
administering an immune sustainer to the subject,
thereby treating cancer in the subject.

89. A method of inducing and sustaining an immune response in a subject, the method comprising
administering a first modified microorganism to the subject, wherein the first modified microorganism is capable of producing an immune initiator; and
administering an immune sustainer to the subject,
thereby inducing and sustaining the immune response in the subject.

90. The method of claim 88 or claim 89, wherein the administering steps are performed at the same time; wherein administering of the first modified microorganism to the subject occurs before administering of the immune sustainer to the subject; or wherein administering of the immune sustainer to the subject occurs before administering of the first modified microorganism to the subject.

91. A method of treating cancer in a subject, the method comprising
administering an immune initiator to the subject; and
administering a first modified microorganism to the subject, wherein the first modified microorganism is capable of producing an immune sustainer,
thereby treating cancer in the subject.

92. A method of inducing and sustaining an immune response in a subject, the method comprising
administering an immune initiator to the subject; and
administering a first modified microorganism to the subject, wherein the first modified microorganism is capable of producing an immune sustainer,
thereby inducing and sustaining the immune response in the subject.

93. The method of claim 91 or claim 92, wherein the administering steps are performed at the same time; wherein the administering of the first modified microorganism to the subject occurs before the administering of the immune initiator to the subject; or wherein the administering of the immune initiator to the subject occurs before the administering of the first modified microorganism to the subject.

94. The method of any one of claims 77-93, wherein the administering is intratumoral injection.

The application's sequence listing, which the Patent Office published only in electronic form, follows.

SEQUENCE LISTING (1446 sequences)

SEQ ID NO: 1 - protein, 447 aa, Artificial Sequence
  source: /note="Description of Artificial Sequence: Synthetic polypeptide"
  source: /note="Heavy chain humanized"
QVQLVQSGVEVKKPGASVKVSCKASGYTFTNYYMYWVRQAPGQGLEWMGGINPSNGGTNFNEKFKNRVTLTTDSSTTTAYMELKSLQFDDTAVYYCARRDYRFDMGFDYWGQGTTVTVSSASTKGPSVFPLAPCSRSTSESTAALGCLVKDYFPEPVTVSWNSGALTSGVHTFPAVLQSSGLYSLSSVVTVPSSSLGTKTYTCNVDHKPSNTKVDKRVESKYGPPCPPCPAPEFLGGPSVFLFPPKPKDTLMISRTPEVTCVVVDVSQEDPEVQFNWYVDGVEVHNAKTKPREEQFNSTYRVVSVLTVLHQDWLNGKEYKCKVSNKGLPSSIEKTISKAKGQPREPQVYTLPPSQEEMTKNQVSLTCLVKGFYPSDIAVEWESNGQPENNYKTTPPVLDSDGSFFLYSRLTVDKSRWQEGNVFSCSVMHEALHNHYTQKSLSLSLGK

SEQ ID NO: 2 - protein, 218 aa, Artificial Sequence
  source: /note="Description of Artificial Sequence: Synthetic polypeptide"
  source: /note="Light chain humanized"
EIVLTQSPATLSLSPGERATLSCRASKGVSTSGYSYLHWYQQKPGQAPRLLIYLASYLESGVPARFSGSGSGTDFTLTISSLEPEDFAVYYCQHSRDLPLTFGGGTKVEIKRTVAAPSVFIFPPSDEQLKSGTASVVCLLNNFYPREAKVQWKVDNALQSGNSQESVTEQDSKDSTYSLSSTLTLSKADYEKHKVYACEVTHQGLSSPVTKSFNRGEC

SEQ ID NO: 3 - protein, 440 aa, Artificial Sequence
  source: /note="Description of Artificial Sequence: Synthetic polypeptide"
  source: /note="Heavy chain human monoclonal"
QVQLVESGGGVVQPGRSLRLDCKASGITFSNSGMHWVRQAPGKGLEWVAVIWYDGSKRYYADSVKGRFTISRDNSKNTLFLQMNSLRAEDTAVYYCATNDDYWGQGTLVTVSSASTKGPSVFPLAPCSRSTSESTAALGCLVKDYFPEPVTVSWNSGALTSGVHTFPAVLQSSGLYSLSSVVTVPSSSLGTKTYTCNVDHKPSNTKVDKRVESKYGPPCPPCPAPEFLGGPSVFLFPPKPKDTLMISRTPEVTCVVVDVSQEDPEVQFNWYVDGVEVHNAKTKPREEQFNSTYRVVSVLTVLHQDWLNGKEYKCKVSNKGLPSSIEKTISKAKGQPREPQVYTLPPSQEEMTKNQVSLTCLVKGFYPSDIAVEWESNGQPENNYKTTPPVLDSDGSFFLYSRLTVDKSRWQEGNVFSCSVMHEALHNHYTQKSLSLSLGK

SEQ ID NO: 4 - protein, 214 aa, Artificial Sequence
  source: /note="Description of Artificial Sequence: Synthetic polypeptide"
  source: /note="Light chain human monoclonal"
EIVLTQSPATLSLSPGERATLSCRASQSVSSYLAWYQQKPGQAPRLLIYDASNRATGIPARFSGSGSGTDFTLTISSLEPEDFAVYYCQQSSNWPRTFGQGTKVEIKRTVAAPSVFIFPPSDEQLKSGTASVVCLLNNFYPREAKVQWKVDNALQSGNSQESVTEQDSKDSTYSLSSTLTLSKADYEKHKVYACEVTHQGLSSPVTKSFNRGEC

SEQ ID NO: 5 - protein, 448 aa, Artificial Sequence
  source: /note="Description of Artificial Sequence: Synthetic polypeptide"
  source: /note="Ipilimumab, CTLA-4, Heavy chain"
QVQLVESGGGVVQPGRSLRLSCAASGFTFSSYTMHWVRQAPGKGLEWVTFISYDGNNKYYADSVKGRFTISRDNSKNTLYLQMNSLRAEDTAIYYCARTGWLGPFDYWGQGTLVTVSSASTKGPSVFPLAPSSKSTSGGTAALGCLVKDYFPEPVTVSWNSGALTSGVHTFPAVLQSSGLYSLSSVVTVPSSSLGTQTYICNVNHKPSNTKVDKRVEPKSCDKTHTCPPCPAPELLGGPSVFLFPPKPKDTLMISRTPEVTCVVVDVSHEDPEVKFNWYVDGVEVHNAKTKPREEQYNSTYRVVSVLTVLHQDWLNGKEYKCKVSNKALPAPIEKTISKAKGQPREPQVYTLPPSRDELTKNQVSLTCLVKGFYPSDIAVEWESNGQPENNYKTTPPVLDSDGSFFLYSKLTVDKSRWQQGNVFSCSVMHEALHNHYTQKSLSLSPGK

SEQ ID NO: 6 - protein, 118 aa, Artificial Sequence
  source: /note="Description of Artificial Sequence: Synthetic polypeptide"
  source: /note="Ipilimumab, CTLA-4, Heavy chain variable region"
QVQLVESGGGVVQPGRSLRLSCAASGFTFSSYTMHWVRQAPGKGLEWVTFISYDGNNKYYADSVKGRFTISRDNSKNTLYLQMNSLRAEDTAIYYCARTGWLGPFDYWGQGTLVTVSS

SEQ ID NO: 7 - protein, 215 aa, Artificial Sequence
  source: /note="Description of Artificial Sequence: Synthetic polypeptide"
  source: /note="Ipilimumab, CTLA-4, Light chain"
EIVLTQSPGTLSLSPGERATLSCRASQSVGSSYLAWYQQKPGQAPRLLIYGAFSRATGIPDRFSGSGSGTDFTLTISRLEPEDFAVYYCQQYGSSPWTFGQGTKVEIKRTVAAPSVFIFPPSDEQLKSGTASVVCLLNNFYPREAKVQWKVDNALQSGNSQESVTEQDSKDSTYSLSSTLTLSKADYEKHKVYACEVTHQGLSSPVTKSFNRGEC

SEQ ID NO: 8 - protein, 108 aa, Artificial Sequence
  source: /note="Description of Artificial Sequence: Synthetic polypeptide"
  source: /note="Ipilimumab, CTLA-4, Light chain variable region"
EIVLTQSPGTLSLSPGERATLSCRASQSVGSSYLAWYQQKPGQAPRLLIYGAFSRATGIPDRFSGSGSGTDFTLTISRLEPEDFAVYYCQQYGSSPWTFGQGTKVEIK

SEQ ID NO: 9 - protein, 411 aa, Artificial Sequence
  source: /note="Description of Artificial Sequence: Synthetic polypeptide"
  source: /note="Tremelimumab (CP675206), CTLA-4, Heavy chain"
PGKGLEWVAVIWYDGSNKYYADSVKGRFTISRDNSKNTLYLQMNSLRAEDTAVYYCARDPRGATLYYYYYGMDVWGQGTTVTVSSASTKGPSVFPLAPCSRSTSESTAALGCLVKDYFPEPVTVSWNSGALTSGVHTFPAVLQSSGLYSLSSVVTVPSSNFGTQTYTCNVDHKPSNTKVDKTVERKCCVECPPCPAPPVAGPSVFLFPPKPKDTLMISRTPEVTCVVVDVSHEDPEVQFNWYVDGVEVHNAKTKPREEQFNSTFRVVSVLTVVHQDWLNGKEYKCKVSNKGLPAPIEKTISKTKGQPREPQVYTLPPSREEMTKNQVSLTCLVKGFYPSDIAVEWESNGQPENNYKTTPPMLDSDGSFFLYSKLTVDKSRWQQGNVFSCSVMHEALHNHYTQKSLSLSPGK

SEQ ID NO: 10 - protein, 214 aa, Artificial Sequence
  source: /note="Description of Artificial Sequence: Synthetic polypeptide"
  source: /note="Tremelimumab (CP675206), CTLA-4, Light chain"
DIQMTQSPSSLSASVGDRVTITCRASQSINSYLDWYQQKPGKAPKLLIYAASSLQSGVPSRFSGSGSGTDFTLTISSLQPEDFATYYCQQYYSTPFTFGPGTKVEIKRTVAAPSVFIFPPSDEQLKSGTASVVCLLNNFYPREAKVQWKVDNALQSGNSQESVTEQDSKDSTYSLSSTLTLSKADYEKHKVYACEVTHQGLSSPVTKSFNRGEC

SEQ ID NO: 11 - protein, 442 aa, Artificial Sequence
  source: /note="Description of Artificial Sequence: Synthetic polypeptide"
  source: /note="PF-05082566, 4-1BB (CD137, TNFRSF9), Heavy chain"
EVQLVQSGAEVKKPGESLRISCKGSGYSFSTYWISWVRQMPGKGLEWMGKIYPGDSYTNYSPSFQGQVTISADKSISTAYLQWSSLKASDTAMYYCARGYGIFDYWGQGTLVTVSSASTKGPSVFPLAPCSRSTSESTAALGCLVKDYFPEPVTVSWNSGALTSGVHTFPAVLQSSGLYSLSSVVTVPSSNFGTQTYTCNVDHKPSNTKVDKTVERKCCVECPPCPAPPVAGPSVFLFPPKPKDTLMISRTPEVTCVVVDVSHEDPEVQFNWYVDGVEVHNAKTKPREEQFNSTFRVVSVLTVVHQDWLNGKEYKCKVSNKGLPAPIEKTISKTKGQPREPQVYTLPPSREEMTKNQVSLTCLVKGFYPSDIAVEWESNGQPENNYKTTPPMLDSDGSFFLYSKLTVDKSRWQQGNVFSCSVMHEALHNHYTQKSLSLSPGK

SEQ ID NO: 12 - protein, 214 aa, Artificial Sequence
  source: /note="Description of Artificial Sequence: Synthetic polypeptide"
  source: /note="PF-05082566, 4-1BB (CD137, TNFRSF9), Light chain"
SYELTQPPSVSVSPGQTASITCSGDNIGDQYAHWYQQKPGQSPVLVIYQDKNRPSGIPERFSGSNSGNTATLTISGTQAMDEADYYCATYTGFGSLAVFGGGTKLTVLGQPKAAPSVTLFPPSSEELQANKATLVCLISDFYPGAVTVAWKADSSPVKAGVETTTPSKQSNNKYAASSYLSLTPEQWKSHRSYSCQVTHEGSTVEKTVAPTECS

SEQ ID NO: 13 - protein, 448 aa, Artificial Sequence
  source: /note="Description of Artificial Sequence: Synthetic polypeptide"
  source: /note="Urelumab, 4-1BB (CD137, TNFRSF9), Heavy chain"
QVQLQQWGAGLLKPSETLSLTCAVYGGSFSGYYWSWIRQSPEKGLEWIGEINHGGYVTYNPSLESRVTISVDTSKNQFSLKLSSVTAADTAVYYCARDYGPGNYDWYFDLWGRGTLVTVSSASTKGPSVFPLAPCSRSTSESTAALGCLVKDYFPEPVTVSWNSGALTSGVHTFPAVLQSSGLYSLSSVVTVPSSSLGTKTYTCNVDHKPSNTKVDKRVESKYGPPCPPCPAPEFLGGPSVFLFPPKPKDTLMISRTPEVTCVVVDVSQEDPEVQFNWYVDGVEVHNAKTKPREEQFNSTYRVVSVLTVLHQDWLNGKEYKCKVSNKGLPSSIEKTISKAKGQPREPQVYTLPPSQEEMTKNQVSLTCLVKGFYPSDIAVEWESNGQPENNYKTTPPVLDSDGSFFLYSRLTVDKSRWQEGNVFSCSVMHEALHNHYTQKSLSLSLGK

SEQ ID NO: 14 - protein, 216 aa, Artificial Sequence
  source: /note="Description of Artificial Sequence: Synthetic polypeptide"
  source: /note="Urelumab, 4-1BB (CD137, TNFRSF9), Light chain"
EIVLTQSPATLSLSPGERATLSCRASQSVSSYLAWYQQKPGQAPRLLIYDASNRATGIPARFSGSGSGTDFTLTISSLEPEDFAVYYCQQRSNWPPALTFCGGTKVEIKRTVAAPSVFIFPPSDEQLKSGTASVVCLLNNFYPREAKVQWKVDNALQSGNSQESVTEQDSKDSTYSLSSTLTLSKADYEKHKVYACEVTHQGLSSPVTKSFNRGEC

SEQ ID NO: 15 - protein, 117 aa, Artificial Sequence
  source: /note="Description of Artificial Sequence: Synthetic polypeptide"
  source: /note="Anti-OX40 antibody (Providence Health and Services)," CD134 (OX40), Heavy chain"
EVQLVESGGGLVQPGGSLRLSCAASGFTFTNYGIHWIRQAPGKGLEWVASISPSGGLTYYRDSVKGRFTISRDDAKNSPYLQMNSLRAEDTAVYYCATGGEGIFDYWGQGTLVTVSS

SEQ ID NO: 16 - protein, 108 aa, Artificial Sequence
  source: /note="Description of Artificial Sequence: Synthetic polypeptide"
  source: /note="Anti-OX40 antibody (Providence Health and Services)," CD134 (OX40), Light chain"
DIQMTQSPSSLSASVGDRVTITCRATQSIYNALAWYQQKPGKAPKLLIYNANTLHTGVPSRFSASGSGTDSTLTISSLQPEDFATYYCQQYYDYPLTFGGGTKVEIKR

SEQ ID NO: 17 - protein, 440 aa, Artificial Sequence; identical to SEQ ID NO: 3
  source: /note="Description of Artificial Sequence: Synthetic polypeptide"
  source: /note="Nivolumab, PD-1, Heavy chain"

SEQ ID NO: 18 - protein, 113 aa, Artificial Sequence [sequence omitted]

SEQ ID NO: 19 - protein, 214 aa, Artificial Sequence; identical to SEQ ID NO: 4
  source: /note="Description of Artificial Sequence: Synthetic polypeptide"
  source: /note="Nivolumab, PD-1, Light chain"

SEQ ID NO: 20 - protein, 107 aa, Artificial Sequence [sequence omitted]

SEQ ID NO: 21 - protein, 447 aa, Artificial Sequence
  source: /note="Description of Artificial Sequence: Synthetic polypeptide"
  source: /note="Pidilizumab, PD-1, Heavy chain"
QVQLVQSGSELKKPGASVKISCKASGYTFTNYGMNWVRQAPGQGLQWMGWINTDSGESTYAEEFKGRFVFSLDTSVNTAYLQITSLTAEDTGMYFCVRVGYDALDYWGQGTLVTVSSASTKGPSVFPLAPSSKSTSGGTAALGCLVKDYFPEPVTVSWNSGALTSGVHTFPAVLQSSGLYSLSSVVTVPSSSLGTQTYICNVNHKPSNTKVDKRVEPKSCDKTHTCPPCPAPELLGGPSVFLFPPKPKDTLMISRTPEVTCVVVDVSHEDPEVKFNWYVDGVEVHNAKTKPREEQYNSTYRVVSVLTVLHQDWLNGKEYKCKVSNKALPAPIEKTISKAKGQPREPQVYTLPPSREEMTKNQVSLTCLVKGFYPSDIAVEWESNGQPENNYKTTPPVLDSDGSFFLYSKLTVDKSRWQQGNVFSCSVMHEALHNHYTQKSLSLSPGK

SEQ ID NO: 22 - skipped

SEQ ID NO: 23 - protein, 213 aa, Artificial Sequence
  source: /note="Description of Artificial Sequence: Synthetic polypeptide"
  source: /note="Pidilizumab, PD-1, Light chain"
EIVLTQSPSSLSASVGDRVTITCSARSSVSYMHWFQQKPGKAPKLWIYRTSNLASGVPSRFSGSGSGTSYCLTINSLQPEDFATYYCQQRSSFPLTFGGGTKLEIKRTVAAPSVFIFPPSDEQLKSGTASVVCLLNNFYPREAKVQWKVDNALQSGNSQESVTEQDSKDSTYSLSSTLTLSKADYEKHKVYACEVTHQGLSSPVTKSFNRGEC

SEQ ID NO: 24 - skipped

SEQ ID NO: 25 - protein, 447 aa, Artificial Sequence; identical to SEQ ID NO: 1
  source: /note="Description of Artificial Sequence: Synthetic polypeptide"
  source: /note="Pembrolizumab (MK-3475/SCH900475, lambrolizumab) PD-1, Heavy chain"

SEQ ID NO: 26 - protein, 218 aa, Artificial Sequence; identical to SEQ ID NO: 2
  source: /note="Description of Artificial Sequence: Synthetic polypeptide"
  source: /note="Pembrolizumab (MK-3475/SCH900475, lambrolizumab), PD-1, Light chain  Heavy chain variable region is described in as described in WO2009114335"

SEQ ID NO: 27 - protein, 451 aa, Artificial Sequence
  source: /note="Description of Artificial Sequence: Synthetic polypeptide"
  source: /note="Durvalumab (MEDI4736), PD-L1, Heavy chain"
EVQLVESGGGLVQPGGSLRLSCAASGFTFSRYWMSWVRQAPGKGLEWVANIKQDGSEKYYVDSVKGRFTISRDNAKNSLYLQMNSLRAEDTAVYYCAREGGWFGELAFDYWGQGTLVTVSSASTKGPSVFPLAPSSKSTSGGTAALGCLVKDYFPEPVTVSWNSGALTSGVHTFPAVLQSSGLYSLSSVVTVPSSSLGTQTYICNVNHKPSNTKVDKRVEPKSCDKTHTCPPCPAPEFEGGPSVFLFPPKPKDTLMISRTPEVTCVVVDVSHEDPEVKFNWYVDGVEVHNAKTKPREEQYNSTYRVVSVLTVLHQDWLNGKEYKCKVSNKALPASIEKTISKAKGQPREPQVYTLPPSREEMTKNQVSLTCLVKGFYPSDIAVEWESNGQPENNYKTTPPVLDSDGSFFLYSKLTVDKSRWQQGNVFSCSVMHEALHNHYTQKSLSLSPGK

SEQ ID NO: 28 - protein, 215 aa, Artificial Sequence
  source: /note="Description of Artificial Sequence: Synthetic polypeptide"
  source: /note="Durvalumab (MEDI4736), PD-L1, Light chain"
EIVLTQSPGTLSLSPGERATLSCRASQRVSSSYLAWYQQKPGQAPRLLIYDASSRATGIPDRFSGSGSGTDFTLTISRLEPEDFAVYYCQQYGSLPWTFGQGTKVEIKRTVAAPSVFIFPPSDEQLKSGTASVVCLLNNFYPREAKVQWKVDNALQSGNSQESVTEQDSKDSTYSLSSTLTLSKADYEKHKVYACEVTHQGLSSPVTKSFNRGEC

SEQ ID NO: 29 - protein, 450 aa, Artificial Sequence
  source: /note="Description of Artificial Sequence: Synthetic polypeptide"
  source: /note="Lirilumab, KIR, Heavy chain"
QVQLVQSGAEVKKPGSSVKVSCKASGGTFSFYAISWVRQAPGQGLEWMGGFIPIFGAANYAQKFQGRVTITADESTSTAYMELSSLRSDDTAVYYCARIPSGSYYYDYDMDVWGQGTTVTVSSASTKGPSVFPLAPCSRSTSESTAALGCLVKDYFPEPVTVSWNSGALTSGVHTFPAVLQSSGLYSLSSVVTVPSSSLGTKTYTCNVDHKPSNTKVDKRVESKYGPPCPPCPAPEFLGGPSVFLFPPKPKDTLMISRTPEVTCVVVDVSQEDPEVQFNWYVDGVEVHNAKTKPREEQFNSTYRVVSVLTVLHQDWLNGKEYKCKVSNKGLPSSIEKTISKAKGQPREPQVYTLPPSQEEMTKNQVSLTCLVKGFYPSDIAVEWESNGQPENNYKTTPPVLDSDGSFFLYSRLTVDKSRWQEGNVFSCSVMHEALHNHYTQKSLSLSLGK

SEQ ID NO: 30 - protein, 214 aa, Artificial Sequence
  source: /note="Description of Artificial Sequence: Synthetic polypeptide"
  source: /note="Lirilumab, KIR, Light chain"
EIVLTQSPVTLSLSPGERATLSCRASQSVSSYLAWYQQKPGQAPRLLIYDASNRATGIPARFSGSGSGTDFTLTISSLEPEDFAVYYCQQRSNWMYTFGQGTKLEIKRTVAAPSVFIFPPSDEQLKSGTASVVCLLNNFYPREAKVQWKVDNALQSGNSQESVTEQDSKDSTYSLSSTLTLSKADYEKHKVYACEVTHQGLSSPVTKSFNRGEC

SEQ ID NO: 31 - protein, 447 aa, Artificial Sequence
  source: /note="Description of Artificial Sequence: Synthetic polypeptide"
  source: /note="BMS-986016, LAG3, Heavy chain"
QVQLQQWGAGLLKPSETLSLTCAVYGGSFSDYYWNWIRQPPGKGLEWIGEINHRGSTNSNPSLKSRVTLSLDTSKNQFSLKLRSVTAADTAVYYCAFGYSDYEYNWFDPWGQGTLVTVSSASTKGPSVFPLAPCSRSTSESTAALGCLVKDYFPEPVTVSWNSGALTSGVHTFPAVLQSSGLYSLSSVVTVPSSSLGTKTYTCNVDHKPSNTKVDKRVESKYGPPCPPCPAPEFLGGPSVFLFPPKPKDTLMISRTPEVTCVVVDVSQEDPEVQFNWYVDGVEVHNAKTKPREEQFNSTYRVVSVLTVLHQDWLNGKEYKCKVSNKGLPSSIEKTISKAKGQPREPQVYTLPPSQEEMTKNQVSLTCLVKGFYPSDIAVEWESNGQPENNYKTTPPVLDSDGSFFLYSRLTVDKSRWQEGNVFSCSVMHEALHNHYTQKSLSLSLGK

SEQ ID NO: 32 - protein, 214 aa, Artificial Sequence
  source: /note="Description of Artificial Sequence: Synthetic polypeptide"
  source: /note="BMS986016, LAG3, Light chain"
EIVLTQSPATLSLSPGERATLSCRASQSISSYLAWYQQKPGQAPRLLIYDASNRATGIPARFSGSGSGTDFTLTISSLEPEDFAVYYCQQRSNWPLTFGQGTNLEIKRTVAAPSVFIFPPSDEQLKSGTASVVCLLNNFYPREAKVQWKVDNALQSGNSQESVTEQDSKDSTYSLSSTLTLSKADYEKHKVYACEVTHQGLSSPVTKSFNRGEC

SEQ ID NO: 33 - protein, 450 aa, Artificial Sequence
  source: /note="Description of Artificial Sequence: Synthetic polypeptide"
  source: /note="Avelumab (MSB0010718C), PD-L1, Heavy chain"
EVQLLESGGGLVQPGGSLRLSCAASGFTFSSYIMMWVRQAPGKGLEWVSSIYPSGGITFYADTVKGRFTISRDNSKNTLYLQMNSLRAEDTAVYYCARIKLGTVTTVDYWGQGTLVTVSSASTKGPSVFPLAPSSKSTSGGTAALGCLVKDYFPEPVTVSWNSGALTSGVHTFPAVLQSSGLYSLSSVVTVPSSSLGTQTYICNVNHKPSNTKVDKKVEPKSCDKTHTCPPCPAPELLGGPSVFLFPPKPKDTLMISRTPEVTCVVVDVSHEDPEVKFNWYVDGVEVHNAKTKPREEQYNSTYRVVSVLTVLHQDWLNGKEYKCKVSNKALPAPIEKTISKAKGQPREPQVYTLPPSRDELTKNQVSLTCLVKGFYPSDIAVEWESNGQPENNYKTTPPVLDSDGSFFLYSKLTVDKSRWQQGNVFSCSVMHEALHNHYTQKSLSLSPGK

SEQ ID NO: 34 - protein, 216 aa, Artificial Sequence
  source: /note="Description of Artificial Sequence: Synthetic polypeptide"
  source: /note="Avelumab (MSB0010718C), PD-L1, Light chain"
QSALTQPASVSGSPGQSITISCTGTSSDVGGYNYVSWYQQHPGKAPKLMIYDVSNRPSGVSNRFSGSKSGNTASLTISGLQAEDEADYYCSSYTSSSTRVFGTGTKVTVLGQPKANPTVTLFPPSSEELQANKATLVCLISDFYPGAVTVAWKADGSPVKAGVETTKPSKQSNNKYAASSYLSLTPEQWKSHRSYSCQVTHEGSTVEKTVAPTECS

SEQ ID NO: 35 - protein, 448 aa, Artificial Sequence
  source: /note="Description of Artificial Sequence: Synthetic polypeptide"
  source: /note="Atezolizumab (MPDL3280A, RG7446, RO5541267) PD-L1, Heavy chain"
EVQLVESGGGLVQPGGSLRLSCAASGFTFSDSWIHWVRQAPGKGLEWVAWISPYGGSTYYADSVKGRFTISADTSKNTAYLQMNSLRAEDTAVYYCARRHWPGGFDYWGQGTLVTVSSASTKGPSVFPLAPSSKSTSGGTAALGCLVKDYFPEPVTVSWNSGALTSGVHTFPAVLQSSGLYSLSSVVTVPSSSLGTQTYICNVNHKPSNTKVDKKVEPKSCDKTHTCPPCPAPELLGGPSVFLFPPKPKDTLMISRTPEVTCVVVDVSHEDPEVKFNWYVDGVEVHNAKTKPREEQYASTYRVVSVLTVLHQDWLNGKEYKCKVSNKALPAPIEKTISKAKGQPREPQVYTLPPSREEMTKNQVSLTCLVKGFYPSDIAVEWESNGQPENNYKTTPPVLDSDGSFFLYSKLTVDKSRWQQGNVFSCSVMHEALHNHYTQKSLSLSPGK

SEQ ID NO: 36 - protein, 118 aa, Artificial Sequence [sequence omitted]

SEQ ID NO: 37 - protein, 214 aa, Artificial Sequence
  source: /note="Description of Artificial Sequence: Synthetic polypeptide"
  source: /note="Atezolizumab (MPDL3280A, RG7446, RO5541267), PD-L1, Light chain"
DIQMTQSPSSLSASVGDRVTITCRASQDVSTAVAWYQQKPGKAPKLLIYSASFLYSGVPSRFSGSGSGTDFTLTISSLQPEDFATYYCQQYLYHPATFGQGTKVEIKRTVAAPSVFIFPPSDEQLKSGTASVVCLLNNFYPREAKVQWKVDNALQSGNSQESVTEQDSKDSTYSLSSTLTLSKADYEKHKVYACEVTHQGLSSPVTKSFNRGEC

SEQ ID NO: 38 - protein, 108 aa, Artificial Sequence
  source: /note="Description of Artificial Sequence: Synthetic polypeptide"
  source: /note="Atezolizumab (MPDL3280A, RG7446, RO5541267), PD-L1, Light chain variable region"
DIQMTQSPSSLSASVGDRVTITCRASQDVSTAVAWYQQKPGKAPKLLIYSASFLYSGVPSRFSGSGSGTDFTLTISSLQPEDFATYYCQQYLYHPATFGQGTKVEIKR

SEQ ID NO: 39 - protein, 449 aa, Artificial Sequence
  source: /note="Description of Artificial Sequence: Synthetic polypeptide"
  source: /note="Mogamulizumab, CCR4, Heavy chain"
EVQLVESGGDLVQPGRSLRLSCAASGFIFSNYGMSWVRQAPGKGLEWVATISSASTYSYYPDSVKGRFTISRDNAKNSLYLQMNSLRVEDTALYYCGRHSDGNFAFGYWGQGTLVTVSSASTKGPSVFPLAPSSKSTSGGTAALGCLVKDYFPEPVTVSWNSGALTSGVHTFPAVLQSSGLYSLSSVVTVPSSSLGTQTYICNVNHKPSNTKVDKKVEPKSCDKTHTCPPCPAPELLGGPSVFLFPPKPKDTLMISRTPEVTCVVVDVSHEDPEVKFNWYVDGVEVHNAKTKPREEQYNSTYRVVSVLTVLHQDWLNGKEYKCKVSNKALPAPIEKTISKAKGQPREPQVYTLPPSRDELTKNQVSLTCLVKGFYPSDIAVEWESNGQPENNYKTTPPVLDSDGSFFLYSKLTVDKSRWQQGNVFSCSVMHEALHNHYTQKSLSLSPGK

SEQ ID NO: 40 - protein, 219 aa, Artificial Sequence
  source: /note="Description of Artificial Sequence: Synthetic polypeptide"
  source: /note="Mogamulizumab, CCR4, Light chain"
DVLMTQSPLSLPVTPGEPASISCRSSRNIVHINGDTYLEWYLQKPGQSPQLLIYKVSNRFSGVPDRFSGSGSGTDFTLKISRVEAEDVGVYYCFQGSLLPWTFGQGTKVEIKRTVAAPSVFIFPPSDEQLKSGTASVVCLLNNFYPREAKVQWKVDNALQSGNSQESVTEQDSKDSTYSLSSTLTLSKADYEKHKVYACEVTHQGLSSPVTKSFNRGEC

SEQ ID NO: 41 - protein, 452 aa, Artificial Sequence
  source: /note="Description of Artificial Sequence: Synthetic polypeptide"
  source: /note="Varlilumab, CD27, Heavy chain"
QVQLVESGGGVVQPGRSLRLSCAASGFTFSSYDMHWVRQAPGKGLEWVAVIWYDGSNKYYADSVKGRFTISRDNSKNTLYLQMNSLRAEDTAVYYCARGSGNWGFFDYWGQGTLVTVSSASTKGPSVFPLAPSSKSTSGGTAALGCLVKDYFPEPVTVSWNSGALTSGVHTFPAVLQSSGLYSLSSVVTVPSSSLGTQTYICNVNHKPSNTKVDKKVEPKSCDKTHTCPPCPAPELLGGPSVFLFPPKPKDTLMISRTPEVTCVVVDVSHEDPEVKFNWYVDGVEVHNAKTKPREEQYNSTYRVVSVLTVLHQDWLNGKEYKCKVSNKALPAPIEKTISKAKGQPREPQVYTLPPSRDELTKNQVSLTCLVKGFYPSDIAVEWESNGQPENNYKTTPPVLDSDGSFFLYSKLTVDKSRWQQGNVFSCSVMHEALHNHYTQKSLSLSPGKGSS

SEQ ID NO: 42 - protein, 214 aa, Artificial Sequence
  source: /note="Description of Artificial Sequence: Synthetic polypeptide"
  source: /note="Varlilumab, CD27, Light chain"
DIQMTQSPSSLSASVGDRVTITCRASQGISRWLAWYQQKPEKAPKSLIYAASSLQSGVPSRFSGSGSGTDFTLTISSLQPEDFATYYCQQYNTYPRTFGQGTKVEIKRTVAAPSVFIFPPSDEQLKSGTASVVCLLNNFYPREAKVQWKVDNALQSGNSQESVTEQDSKDSTYSLSSTLTLSKADYEKHKVYACEVTHQGLSSPVTKSFNRGEC

SEQ ID NO: 43 - protein, 451 aa, Artificial Sequence
  source: /note="Description of Artificial Sequence: Synthetic polypeptide"
  source: /note="Ulocuplumab, CXCR4, Heavy chain"
EVQLVESGGGLVQPGGSLRLSCAAAGFTFSSYSMNWVRQAPGKGLEWVSYISSRSRTIYYADSVKGRFTISRDNAKNSLYLQMNSLRDEDTAVYYCARDYGGQPPYYYYYGMDVWGQGTTVTVSSASTKGPSVFPLAPCSRSTSESTAALGCLVKDYFPEPVTVSWNSGALTSGVHTFPAVLQSSGLYSLSSVVTVPSSSLGTKTYTCNVDHKPSNTKVDKRVESKYGPPCPPCPAPEFLGGPSVFLFPPKPKDTLMISRTPEVTCVVVDVSQEDPEVQFNWYVDGVEVHNAKTKPREEQFNSTYRVVSVLTVLHQDWLNGKEYKCKVSNKGLPSSIEKTISKAKGQPREPQVYTLPPSQEEMTKNQVSLTCLVKGFYPSDIAVEWESNGQPENNYKTTPPVLDSDGSFFLYSRLTVDKSRWQEGNVFSCSVMHEALHNHYTQKSLSLSLG

SEQ ID NO: 44 - protein, 214 aa, Artificial Sequence
  source: /note="Description of Artificial Sequence: Synthetic polypeptide"
  source: /note="Ulocuplumab, CXCR4, Light chain"
DIQMTQSPSSLSASVGDRVTITCRASQGISSWLAWYQQKPEKAPKSLIYAASSLQSGVPSRFSGSGSGTDFTLTISSLQPEDFVTYYCQQYNSYPRTFGQGTKVEIKRTVAAPSVFIFPPSDEQLKSGTASVVCLLNNFYPREAKVQWKVDNALQSGNSQESVTEQDSKDSTYSLSSTLTLSKADYEKHKVYACEVTHQGLSSPVTKSFNRGEC

SEQ ID NO: 45 - protein, 450 aa, Artificial Sequence
  source: /note="Description of Artificial Sequence: Synthetic polypeptide"
  source: /note="Bavituximab, Phosphatidyl Serine, Heavy chain"
EVQLQQSGPELEKPGASVKLSCKASGYSFTGYNMNWVKQSHGKSLEWIGHIDPYYGDTSYNQKFRGKATLTVDKSSSTAYMQLKSLTSEDSAVYYCVKGGYYGHWYFDVWGAGTTVTVSSASTKGPSVFPLAPSSKSTSGGTAALGCLVKDYFPEPVTVSWNSGALTSGVHTFPAVLQSSGLYSLSSVVTVPSSSLGTQTYICNVNHKPSNTKVDKKVEPKSCDKTHTCPPCPAPELLGGPSVFLFPPKPKDTLMISRTPEVTCVVVDVSHEDPEVKFNWYVDGVEVHNAKTKPREEQYNSTYRVVSVLTVLHQDWLNGKEYKCKVSNKALPAPIEKTISKAKGQPREPQVYTLPPSRDELTKNQVSLTCLVKGFYPSDIAVEWESNGQPENNYKTTPPVLDSDGSFFLYSKLTVDKSRWQQGNVFSCSVMHEALHNHYTQKSLSLSPGK

SEQ ID NO: 46 - protein, 164 aa, Artificial Sequence
  source: /note="Description of Artificial Sequence: Synthetic polypeptide"
  source: /note="Bavituxumab, Phosphatidyl Serine, Light chain"
TSSLDSGVPKRFSGSRSGSDYSLTISSLESEDFVDYYCLQYVSSPPTFGAGTKLELKRADAAPSVFIFPPSDEQLKSGTASVVCLLNNFYPREAKVQWKVDNALQSGNSQESVTEQDSKDSTYSLSSTLTLSKADYEKHKVYACEVTHQGLSSPVTKSFNRGEC

SEQ ID NO: 47 - DNA, 7584 bp, Artificial Sequence
  source: /note="Description of Artificial Sequence: Synthetic polynucleotide"
  source: /note="Tet-regulated Tryptophan operon"
taagacccactttcacatttaagttgtttttctaatccgcatatgatcaattcaaggccgaataagaaggctggctctgcaccttggtgatcaaataattcgatagcttgtcgtaataatggcggcatactatcagtagtaggtgtttccctttcttctttagcgacttgatgctcttgatcttccaatacgcaacctaaagtaaaatgccccacagcgctgagtgcatataatgcattctctagtgaaaaaccttgttggcataaaaaggctaattgattttcgagagtttcatactgtttttctgtaggccgtgtacctaaatgtacttttgctccatcgcgatgacttagtaaagcacatctaaaacttttagcgttattacgtaaaaaatcttgccagctttccccttctaaagggcaaaagtgagtatggtgcctatctaacatctcaatggctaaggcgtcgagcaaagcccgcttattttttacatgccaatacaatgtaggctgctctacacctagcttctgggcgagtttacgggttgttaaaccttcgattccgacctcattaagcagctctaatgcgctgttaatcactttacttttatctaatctagacatcattaattcctaatttttgttgacactctatcattgatagagttattttaccactccctatcagtgatagagaaaagtgaactctagaaataattttgtttaactttaagaaggagatatacatatgcaaacacaaaaaccgactctcgaactgctaacctgcgaaggcgcttatcgcgacaacccgactgcgctttttcaccagttgtgtggggatcgtccggcaacgctgctgctggaatccgcagatatcgacagcaaagatgatttaaaaagcctgctgctggtagacagtgcgctgcgcattacagcattaagtgacactgtcacaatccaggcgctttccggcaatggagaagccctgttgacactactggataacgccttgcctgcgggtgtggaaaatgaacaatcaccaaactgccgcgtactgcgcttcccgcctgtcagtccactgctggatgaagacgcccgcttatgctccctttcggtttttgacgctttccgcttattacagaatctgttgaatgtaccgaaggaagaacgagaagcaatgttcttcggcggcctgttctcttatgaccttgtggcgggatttgaaaatttaccgcaactgtcagcggaaaatagctgccctgatttctgtttttatctcgctgaaacgctgatggtgattgaccatcagaaaaaaagcactcgtattcaggccagcctgtttgctccgaatgaagaagaaaaacaacgtctcactgctcgcctgaacgaactacgtcagcaactgaccgaagccgcgccgccgctgccggtggtttccgtgccgcatatgcgttgtgaatgtaaccagagcgatgaagagttcggtggtgtagtgcgtttgttgcaaaaagcgattcgcgccggagaaattttccaggtggtgccatctcgccgtttctctctgccctgcccgtcaccgctggcagcctattacgtgctgaaaaagagtaatcccagcccgtacatgttttttatgcaggataatgatttcaccctgtttggcgcgtcgccggaaagttcgctcaagtatgacgccaccagccgccagattgagatttacccgattgccggaacacgtccacgcggtcgtcgtgccgatggttcgctggacagagacctcgacagccgcatcgaactggagatgcgtaccgatcataaagagctttctgaacatctgatgctggtggatctcgcccgtaatgacctggcacgcatttgcacacccggcagccgctacgtcgccgatctcaccaaagttgaccgttactcttacgtgatgcacctagtctcccgcgttgttggtgagctgcgccacgatctcgacgccctgcacgcttaccgcgcctgtatgaatatggggacgttaagcggtgcaccgaaagtacgcgctatgcagttaattgccgaagcagaaggtcgtcgacgcggcagctacggcggcgcggtaggttattttaccgcgcatggcgatctcgacacctgcattgtgatccgctcggcgctggtggaaaacggtatcgccaccgtgcaagccggtgctggcgtagtccttgattctgttccgcagtcggaagccgacgaaactcgtaataaagcccgcgctgtactgcgcgctattgccaccgcgcatcatgcacaggagacgttctaatggctgacattctgctgctcgataatatcgactcttttacgtacaacctggcagatcagttgcgcagcaatggtcataacgtggtgatttaccgcaaccatattccggcgcagaccttaattgaacgcctggcgacgatgagcaatccggtgctgatgctttctcctggccccggtgtgccgagcgaagccggttgtatgccggaactcctcacccgcttgcgtggcaagctgccaattattggcatttgcctcggacatcaggcgattgtcgaagcttacgggggctatgtcggtcaggcgggcgaaattcttcacggtaaagcgtcgagcattgaacatgacggtcaggcgatgtttgccggattaacaaacccgctgccagtggcgcgttatcactcgctggttggcagtaacattccggccggtttaaccatcaacgcccattttaatggcatggtgatggcggtgcgtcacgatgcagatcgcgtttgtggattccagttccatccggaatccattcttactacccagggcgctcgcctgctggaacaaacgctggcctgggcgcagcagaaactagagccaaccaacacgctgcaaccgattctggaaaaactgtatcaggcacagacgcttagccaacaagaaagccaccagctgttttcagcggtggtacgtggcgagctgaagccggaacaactggcggcggcgctggtgagcatgaaaattcgcggtgaacacccgaacgagatcgccggggcagcaaccgcgctactggaaaacgccgcgccattcccgcgcccggattatctgtttgccgatatcgtcggtactggcggtgacggcagcaacagcatcaatatttctaccgccagtgcgtttgtcgccgcggcctgcgggctgaaagtggcgaaacacggcaaccgtagcgtctccagtaaatccggctcgtcggatctgctggcggcgttcggtattaatcttgatatgaacgccgataaatcgcgccaggcgctggatgagttaggcgtctgtttcctctttgcgccgaagtatcacaccggattccgccatgcgatgccggttcgccagcaactgaaaacccgcactctgttcaacgtgctgggaccattgattaacccggcgcatccgccgctggcgctaattggtgtttatagtccggaactggtgctgccgattgccgaaaccttgcgcgtgctggggtatcaacgcgcggcagtggtgcacagcggcgggatggatgaagtttcattacacgcgccgacaatcgttgccgaactacatgacggcgaaattaagagctatcaattgaccgctgaagattttggcctgacaccctaccaccaggagcaattggcaggcggaacaccggaagaaaaccgtgacattttaacacgcttgttacaaggtaaaggcgacgccgcccatgaagcagccgtcgcggcgaatgtcgccatgttaatgcgcctgcatggccatgaagatctgcaagccaatgcgcaaaccgttcttgaggtactgcgcagtggttccgcttacgacagagtcaccgcactggcggcacgagggtaaatgatgcaaaccgttttagcgaaaatcgtcgcagacaaggcgatttgggtagaaacccgcaaagagcagcaaccgctggccagttttcagaatgaggttcagccgagcacgcgacatttttatgatgcacttcagggcgcacgcacggcgtttattctggagtgtaaaaaagcgtcgccgtcaaaaggcgtgatccgtgatgatttcgatccggcacgcattgccgccatttataaacattacgcttcggcaatttcagtgctgactgatgagaaatattttcaggggagctttgatttcctccccatcgtcagccaaatcgccccgcagccgattttatgtaaagacttcattatcgatccttaccagatctatctggcgcgctattaccaggccgatgcctgcttattaatgctttcagtactggatgacgaacaatatcgccagcttgcagccgtcgcccacagtctggagatgggtgtgctgaccgaagtcagtaatgaagaggaactggagcgcgccattgcattgggggcaaaggtcgttggcatcaacaaccgcgatctgcgcgatttgtcgattgatctcaaccgtacccgcgagcttgcgccgaaactggggcacaacgtgacggtaatcagcgaatccggcatcaatacttacgctcaggtgcgcgagttaagccacttcgctaacggctttctgattggttcggcgttgatggcccatgacgatttgaacgccgccgtgcgtcgggtgttgctgggtgagaataaagtatgtggcctgacacgtgggcaagatgctaaagcagcttatgacgcgggcgcgatttacggtgggttgatttttgttgcgacatcaccgcgttgcgtcaacgttgaacaggcgcaggaagtgatggctgcagcaccgttgcagtatgttggcgtgttccgcaatcacgatattgccgatgtggcggacaaagctaaggtgttatcgctggcggcagtgcaactgcatggtaatgaagatcagctgtatatcgacaatctgcgtgaggctctgccagcacacgtcgccatctggaaggctttaagtgtcggtgaaactcttcccgcgcgcgattttcagcacatcgataaatatgtattcgacaacggtcagggcgggagcggacaacgtttcgactggtcactattaaatggtcaatcgcttggcaacgttctgctggcggggggcttaggcgcagataactgcgtggaagcggcacaaaccggctgcgccgggcttgattttaattctgctgtagagtcgcaaccgggtatcaaagacgcacgtcttttggcctcggttttccagacgctgcgcgcatattaaggaaaggaacaatgacaacattacttaacccctattttggtgagtttggcggcatgtacgtgccacaaatcctgatgcctgctctgcgccagctggaagaagcttttgtcagcgcgcaaaaagatcctgaatttcaggctcagttcaacgacctgctgaaaaactatgccgggcgtccaaccgcgctgaccaaatgccagaacattacagccgggacgaacaccacgctgtatctgaagcgcgaagatttgctgcacggcggcgcgcataaaactaaccaggtgctcggtcaggctttactggcgaagcggatgggtaaaactgaaattattgccgaaaccggtgccggtcagcatggcgtggcgtcggcccttgccagcgccctgctcggcctgaaatgccgaatttatatgggtgccaaagacgttgaacgccagtcgcccaacgttttccggatgcgcttaatgggtgcggaagtgatcccggtacatagcggttccgcgaccctgaaagatgcctgtaatgaggcgctacgcgactggtccggcagttatgaaaccgcgcactatatgctgggtaccgcagctggcccgcatccttacccgaccattgtgcgtgagtttcagcggatgattggcgaagaaacgaaagcgcagattctggaaagagaaggtcgcctgccggatgccgttatcgcctgtgttggcggtggttcgaatgccatcggtatgtttgcagatttcatcaacgaaaccgacgtcggcctgattggtgtggagcctggcggccacggtatcgaaactggcgagcacggcgcaccgttaaaacatggtcgcgtgggcatctatttcggtatgaaagcgccgatgatgcaaaccgaagacgggcaaattgaagagtcttactccatttctgccgggctggatttcccgtccgtcggcccgcaacatgcgtatctcaacagcactggacgcgctgattacgtgtctattaccgacgatgaagccctggaagcctttaaaacgctttgcctgcatgaagggatcatcccggcgctggaatcctcccacgccctggcccatgcgctgaaaatgatgcgcgaaaatccggaaaaagagcagctactggtggttaacctttccggtcgcggcgataaagacatcttcaccgttcacgatattttgaaagcacgaggggaaatctgatggaacgctacgaatctctgtttgcccagttgaaggagcgcaaagaaggcgcattcgttcctttcgtcaccctcggtgatccgggcattgagcagtcgttgaaaattatcgatacgctaattgaagccggtgctgacgcgctggagttaggcatccccttctccgacccactggcggatggcccgacgattcaaaacgccacactgcgtgcttttgcggcgggagtaaccccggcgcagtgctttgagatgctggcactcattcgccagaagcacccgaccattcccatcggccttttgatgtatgccaacctggtgtttaacaaaggcattgatgagttttatgccgagtgcgagaaagtcggcgtcgattcggtgctggttgccgatgtgcccgtggaagagtccgcgcccttccgccaggccgcgttgcgtcataatgtcgcacctatctttatttgcccgccgaatgccgacgatgatttgctgcgccagatagcctcttacggtcgtggttacacctatttgctgtcgcgagcgggcgtgaccggcgcagaaaaccgcgccgcgttacccctcaatcatctggttgcgaagctgaaagagtacaacgctgcgcctccattgcagggatttggtatttccgccccggatcaggtaaaagccgcgattgatgcaggagctgcgggcgcgatttctggttcggccatcgttaaaatcatcgagcaacatattaatgagccagagaaaatgctggcggcactgaaagcttttgtacaaccgatgaaagcggcgacgcgcagttaatacgcatggcatggatgaccgatggtagtgtggggtctccccatgcgagagtagggaactgccaggcatcaaataaaacgaaaggctcagtcgaaagactgggcctttcgttttatctgttgtttgtcggtgaacgctctcctgagtaggacaaatccgccgggagcggatttgaacgttgcgaagcaacggcccggagggtggcgggcaggacgcccgccataaactgccaggcatcaaattaagcagaaggccatcctgacggatggcctttttgcgtggccagtgccaagcttgcatgcgtgc

SEQ ID NO: 48 - DNA, 623 bp, Artificial Sequence
  source: /note="Description of Artificial Sequence: Synthetic polynucleotide"
  source: /note="Tet repressor"
taagacccactttcacatttaagttgtttttctaatccgcatatgatcaattcaaggccgaataagaaggctggctctgcaccttggtgatcaaataattcgatagcttgtcgtaataatggcggcatactatcagtagtaggtgtttccctttcttctttagcgacttgatgctcttgatcttccaatacgcaacctaaagtaaaatgccccacagcgctgagtgcatataatgcattctctagtgaaaaaccttgttggcataaaaaggctaattgattttcgagagtttcatactgtttttctgtaggccgtgtacctaaatgtacttttgctccatcgcgatgacttagtaaagcacatctaaaacttttagcgttattacgtaaaaaatcttgccagctttccccttctaaagggcaaaagtgagtatggtgcctatctaacatctcaatggctaaggcgtcgagcaaagcccgcttattttttacatgccaatacaatgtaggctgctctacacctagcttctgggcgagtttacgggttgttaaaccttcgattccgacctcattaagcagctctaatgcgctgttaatcactttacttttatctaatctagacat

SEQ ID NO: 49 - DNA, 124 bp, Artificial Sequence
  source: /note="Description of Artificial Sequence: Synthetic polynucleotide"
  source: /note="tetR/tetA promoters and RBS and leader region"
cattaattcctaatttttgttgacactctatcattgatagagttattttaccactccctatcagtgatagagaaaagtgaactctagaaataattttgtttaactttaagaaggagatatacat

SEQ ID NO: 50 - DNA, 1562 bp, Artificial Sequence
  source: /note="Description of Artificial Sequence: Synthetic polynucleotide"
  source: /note="trpE"
atgcaaacacaaaaaccgactctcgaactgctaacctgcgaaggcgcttatcgcgacaacccgactgcgctttttcaccagttgtgtggggatcgtccggcaacgctgctgctggaatccgcagatatcgacagcaaagatgatttaaaaagcctgctgctggtagacagtgcgctgcgcattacagcattaagtgacactgtcacaatccaggcgctttccggcaatggagaagccctgttgacactactggataacgccttgcctgcgggtgtggaaaatgaacaatcaccaaactgccgcgtactgcgcttcccgcctgtcagtccactgctggatgaagacgcccgcttatgctccctttcggtttttgacgctttccgcttattacagaatctgttgaatgtaccgaaggaagaacgagaagcaatgttcttcggcggcctgttctcttatgaccttgtggcgggatttgaaaatttaccgcaactgtcagcggaaaatagctgccctgatttctgtttttatctcgctgaaacgctgatggtgattgaccatcagaaaaaaagcactcgtattcaggccagcctgtttgctccgaatgaagaagaaaaacaacgtctcactgctcgcctgaacgaactacgtcagcaactgaccgaagccgcgccgccgctgccggtggtttccgtgccgcatatgcgttgtgaatgtaaccagagcgatgaagagttcggtggtgtagtgcgtttgttgcaaaaagcgattcgcgccggagaaattttccaggtggtgccatctcgccgtttctctctgccctgcccgtcaccgctggcagcctattacgtgctgaaaaagagtaatcccagcccgtacatgttttttatgcaggataatgatttcaccctgtttggcgcgtcgccggaaagttcgctcaagtatgacgccaccagccgccagattgagatttacccgattgccggaacacgtccacgcggtcgtcgtgccgatggttcgctggacagagacctcgacagccgcatcgaactggagatgcgtaccgatcataaagagctttctgaacatctgatgctggtggatctcgcccgtaatgacctggcacgcatttgcacacccggcagccgctacgtcgccgatctcaccaaagttgaccgttactcttacgtgatgcacctagtctcccgcgttgttggtgagctgcgccacgatctcgacgccctgcacgcttaccgcgcctgtatgaatatggggacgttaagcggtgcaccgaaagtacgcgctatgcagttaattgccgaagcagaaggtcgtcgacgcggcagctacggcggcgcggtaggttattttaccgcgcatggcgatctcgacacctgcattgtgatccgctcggcgctggtggaaaacggtatcgccaccgtgcaagccggtgctggcgtagtccttgattctgttccgcagtcggaagccgacgaaactcgtaataaagcccgcgctgtactgcgcgctattgccaccgcgcatcatgcacaggagacgttcta

SEQ ID NO: 51 - DNA, 1596 bp, Artificial Sequence
  source: /note="Description of Artificial Sequence: Synthetic polynucleotide"
  source: /note="trpD"
atggctgacattctgctgctcgataatatcgactcttttacgtacaacctggcagatcagttgcgcagcaatggtcataacgtggtgatttaccgcaaccatattccggcgcagaccttaattgaacgcctggcgacgatgagcaatccggtgctgatgctttctcctggccccggtgtgccgagcgaagccggttgtatgccggaactcctcacccgcttgcgtggcaagctgccaattattggcatttgcctcggacatcaggcgattgtcgaagcttacgggggctatgtcggtcaggcgggcgaaattcttcacggtaaagcgtcgagcattgaacatgacggtcaggcgatgtttgccggattaacaaacccgctgccagtggcgcgttatcactcgctggttggcagtaacattccggccggtttaaccatcaacgcccattttaatggcatggtgatggcggtgcgtcacgatgcagatcgcgtttgtggattccagttccatccggaatccattcttactacccagggcgctcgcctgctggaacaaacgctggcctgggcgcagcagaaactagagccaaccaacacgctgcaaccgattctggaaaaactgtatcaggcacagacgcttagccaacaagaaagccaccagctgttttcagcggtggtacgtggcgagctgaagccggaacaactggcggcggcgctggtgagcatgaaaattcgcggtgaacacccgaacgagatcgccggggcagcaaccgcgctactggaaaacgccgcgccattcccgcgcccggattatctgtttgccgatatcgtcggtactggcggtgacggcagcaacagcatcaatatttctaccgccagtgcgtttgtcgccgcggcctgcgggctgaaagtggcgaaacacggcaaccgtagcgtctccagtaaatccggctcgtcggatctgctggcggcgttcggtattaatcttgatatgaacgccgataaatcgcgccaggcgctggatgagttaggcgtctgtttcctctttgcgccgaagtatcacaccggattccgccatgcgatgccggttcgccagcaactgaaaacccgcactctgttcaacgtgctgggaccattgattaacccggcgcatccgccgctggcgctaattggtgtttatagtccggaactggtgctgccgattgccgaaaccttgcgcgtgctggggtatcaacgcgcggcagtggtgcacagcggcgggatggatgaagtttcattacacgcgccgacaatcgttgccgaactacatgacggcgaaattaagagctatcaattgaccgctgaagattttggcctgacaccctaccaccaggagcaattggcaggcggaacaccggaagaaaaccgtgacattttaacacgcttgttacaaggtaaaggcgacgccgcccatgaagcagccgtcgcggcgaatgtcgccatgttaatgcgcctgcatggccatgaagatctgcaagccaatgcgcaaaccgttcttgaggtactgcgcagtggttccgcttacgacagagtcaccgcactggcggcacgagggtaa

SEQ ID NO: 52 - DNA, 1359 bp, Artificial Sequence
  source: /note="Description of Artificial Sequence: Synthetic polynucleotide"
  source: /note="trpC"
atgcaaaccgttttagcgaaaatcgtcgcagacaaggcgatttgggtagaaacccgcaaagagcagcaaccgctggccagttttcagaatgaggttcagccgagcacgcgacatttttatgatgcacttcagggcgcacgcacggcgtttattctggagtgtaaaaaagcgtcgccgtcaaaaggcgtgatccgtgatgatttcgatccggcacgcattgccgccatttataaacattacgcttcggcaatttcagtgctgactgatgagaaatattttcaggggagctttgatttcctccccatcgtcagccaaatcgccccgcagccgattttatgtaaagacttcattatcgatccttaccagatctatctggcgcgctattaccaggccgatgcctgcttattaatgctttcagtactggatgacgaacaatatcgccagcttgcagccgtcgcccacagtctggagatgggtgtgctgaccgaagtcagtaatgaagaggaactggagcgcgccattgcattgggggcaaaggtcgttggcatcaacaaccgcgatctgcgcgatttgtcgattgatctcaaccgtacccgcgagcttgcgccgaaactggggcacaacgtgacggtaatcagcgaatccggcatcaatacttacgctcaggtgcgcgagttaagccacttcgctaacggctttctgattggttcggcgttgatggcccatgacgatttgaacgccgccgtgcgtcgggtgttgctgggtgagaataaagtatgtggcctgacacgtgggcaagatgctaaagcagcttatgacgcgggcgcgatttacggtgggttgatttttgttgcgacatcaccgcgttgcgtcaacgttgaacaggcgcaggaagtgatggctgcagcaccgttgcagtatgttggcgtgttccgcaatcacgatattgccgatgtggcggacaaagctaaggtgttatcgctggcggcagtgcaactgcatggtaatgaagatcagctgtatatcgacaatctgcgtgaggctctgccagcacacgtcgccatctggaaggctttaagtgtcggtgaaactcttcccgcgcgcgattttcagcacatcgataaatatgtattcgacaacggtcagggcgggagcggacaacgtttcgactggtcactattaaatggtcaatcgcttggcaacgttctgctggcggggggcttaggcgcagataactgcgtggaagcggcacaaaccggctgcgccgggcttgattttaattctgctgtagagtcgcaaccgggtatcaaagacgcacgtcttttggcctcggttttccagacgctgcgcgcatattaa

SEQ ID NO: 53 - DNA, 1194 bp, Artificial Sequence
  source: /note="Description of Artificial Sequence: Synthetic polynucleotide"
  source: /note="trpB"
atgacaacattacttaacccctattttggtgagtttggcggcatgtacgtgccacaaatcctgatgcctgctctgcgccagctggaagaagcttttgtcagcgcgcaaaaagatcctgaatttcaggctcagttcaacgacctgctgaaaaactatgccgggcgtccaaccgcgctgaccaaatgccagaacattacagccgggacgaacaccacgctgtatctgaagcgcgaagatttgctgcacggcggcgcgcataaaactaaccaggtgctcggtcaggctttactggcgaagcggatgggtaaaactgaaattattgccgaaaccggtgccggtcagcatggcgtggcgtcggcccttgccagcgccctgctcggcctgaaatgccgaatttatatgggtgccaaagacgttgaacgccagtcgcccaacgttttccggatgcgcttaatgggtgcggaagtgatcccggtacatagcggttccgcgaccctgaaagatgcctgtaatgaggcgctacgcgactggtccggcagttatgaaaccgcgcactatatgctgggtaccgcagctggcccgcatccttacccgaccattgtgcgtgagtttcagcggatgattggcgaagaaacgaaagcgcagattctggaaagagaaggtcgcctgccggatgccgttatcgcctgtgttggcggtggttcgaatgccatcggtatgtttgcagatttcatcaacgaaaccgacgtcggcctgattggtgtggagcctggcggccacggtatcgaaactggcgagcacggcgcaccgttaaaacatggtcgcgtgggcatctatttcggtatgaaagcgccgatgatgcaaaccgaagacgggcaaattgaagagtcttactccatttctgccgggctggatttcccgtccgtcggcccgcaacatgcgtatctcaacagcactggacgcgctgattacgtgtctattaccgacgatgaagccctggaagcctttaaaacgctttgcctgcatgaagggatcatcccggcgctggaatcctcccacgccctggcccatgcgctgaaaatgatgcgcgaaaatccggaaaaagagcagctactggtggttaacctttccggtcgcggcgataaagacatcttcaccgttcacgatattttgaaagcacgaggggaaatctga

SEQ ID NO: 54 - DNA, 807 bp, Artificial Sequence
  source: /note="Description of Artificial Sequence: Synthetic polynucleotide"
  source: /note="trpA"
atggaacgctacgaatctctgtttgcccagttgaaggagcgcaaagaaggcgcattcgttcctttcgtcaccctcggtgatccgggcattgagcagtcgttgaaaattatcgatacgctaattgaagccggtgctgacgcgctggagttaggcatccccttctccgacccactggcggatggcccgacgattcaaaacgccacactgcgtgcttttgcggcgggagtaaccccggcgcagtgctttgagatgctggcactcattcgccagaagcacccgaccattcccatcggccttttgatgtatgccaacctggtgtttaacaaaggcattgatgagttttatgccgagtgcgagaaagtcggcgtcgattcggtgctggttgccgatgtgcccgtggaagagtccgcgcccttccgccaggccgcgttgcgtcataatgtcgcacctatctttatttgcccgccgaatgccgacgatgatttgctgcgccagatagcctcttacggtcgtggttacacctatttgctgtcgcgagcgggcgtgaccggcgcagaaaaccgcgccgcgttacccctcaatcatctggttgcgaagctgaaagagtacaacgctgcgcctccattgcagggatttggtatttccgccccggatcaggtaaaagccgcgattgatgcaggagctgcgggcgcgatttctggttcggccatcgttaaaatcatcgagcaacatattaatgagccagagaaaatgctggcggcactgaaagcttttgtacaaccgatgaaagcggcgacgcgcagttaa

SEQ ID NO: 55 - protein, 520 aa, Artificial Sequence
  source: /note="Description of Artificial Sequence: Synthetic polypeptide"
  source: /note="TrpE"
MQTQKPTLELLTCEGAYRDNPTALFHQLCGDRPATLLLESADIDSKDDLKSLLLVDSALRITALSDTVTIQALSGNGEALLTLLDNALPAGVENEQSPNCRVLRFPPVSPLLDEDARLCSLSVFDAFRLLQNLLNVPKEEREAMFFGGLFSYDLVAGFENLPQLSAENSCPDFCFYLAETLMVIDHQKKSTRIQASLFAPNEEEKQRLTARLNELRQQLTEAAPPLPVVSVPHMRCECNQSDEEFGGVVRLLQKAIRAGEIFQVVPSRRFSLPCPSPLAAYYVLKKSNPSPYMFFMQDNDFTLFGASPESSLKYDATSRQIEIYPIAGTRPRGRRADGSLDRDLDSRIELEMRTDHKELSEHLMLVDLARNDLARICTPGSRYVADLTKVDRYSYVMHLVSRVVGELRHDLDALHAYRACMNMGTLSGAPKVRAMQLIAEAEGRRRGSYGGAVGYFTAHGDLDTCIVIRSALVENGIATVQAGAGVVLDSVPQSEADETRNKARAVLRAIATAHHAQETF

SEQ ID NO: 56 - protein, 531 aa, Artificial Sequence
  source: /note="Description of Artificial Sequence: Synthetic polypeptide"
  source: /note="TrpD"
MADILLLDNIDSFTYNLADQLRSNGHNVVIYRNHIPAQTLIERLATMSNPVLMLSPGPGVPSEAGCMPELLTRLRGKLPIIGICLGHQAIVEAYGGYVGQAGEILHGKASSIEHDGQAMFAGLTNPLPVARYHSLVGSNIPAGLTINAHFNGMVMAVRHDADRVCGFQFHPESILTTQGARLLEQTLAWAQQKLEPTNTLQPILEKLYQAQTLSQQESHQLFSAVVRGELKPEQLAAALVSMKIRGEHPNEIAGAATALLENAAPFPRPDYLFADIVGTGGDGSNSINISTASAFVAAACGLKVAKHGNRSVSSKSGSSDLLAAFGINLDMNADKSRQALDELGVCFLFAPKYHTGFRHAMPVRQQLKTRTLFNVLGPLINPAHPPLALIGVYSPELVLPIAETLRVLGYQRAAVVHSGGMDEVSLHAPTIVAELHDGEIKSYQLTAEDFGLTPYHQEQLAGGTPEENRDILTRLLQGKGDAAHEAAVAANVAMLMRLHGHEDLQANAQTVLEVLRSGSAYDRVTALAARG

SEQ ID NO: 57 - protein, 452 aa, Artificial Sequence
  source: /note="Description of Artificial Sequence: Synthetic polypeptide"
  source: /note="TrpC"
MQTVLAKIVADKAIWVETRKEQQPLASFQNEVQPSTRHFYDALQGARTAFILECKKASPSKGVIRDDFDPARIAAIYKHYASAISVLTDEKYFQGSFDFLPIVSQIAPQPILCKDFIIDPYQIYLARYYQADACLLMLSVLDDEQYRQLAAVAHSLEMGVLTEVSNEEELERAIALGAKVVGINNRDLRDLSIDLNRTRELAPKLGHNVTVISESGINTYAQVRELSHFANGFLIGSALMAHDDLNAAVRRVLLGENKVCGLTRGQDAKAAYDAGAIYGGLIFVATSPRCVNVEQAQEVMAAAPLQYVGVFRNHDIADVADKAKVLSLAAVQLHGNEDQLYIDNLREALPAHVAIWKALSVGETLPARDFQHIDKYVFDNGQGGSGQRFDWSLLNGQSLGNVLLAGGLGADNCVEAAQTGCAGLDFNSAVESQPGIKDARLLASVFQTLRAY

SEQ ID NO: 58 - protein, 397 aa, Artificial Sequence
  source: /note="Description of Artificial Sequence: Synthetic polypeptide"
  source: /note="TrpB"
MTTLLNPYFGEFGGMYVPQILMPALRQLEEAFVSAQKDPEFQAQFNDLLKNYAGRPTALTKCQNITAGTNTTLYLKREDLLHGGAHKTNQVLGQALLAKRMGKTEIIAETGAGQHGVASALASALLGLKCRIYMGAKDVERQSPNVFRMRLMGAEVIPVHSGSATLKDACNEALRDWSGSYETAHYMLGTAAGPHPYPTIVREFQRMIGEETKAQILEREGRLPDAVIACVGGGSNAIGMFADFINETDVGLIGVEPGGHGIETGEHGAPLKHGRVGIYFGMKAPMMQTEDGQIEESYSISAGLDFPSVGPQHAYLNSTGRADYVSITDDEALEAFKTLCLHEGIIPALESSHALAHALKMMRENPEKEQLLVVNLSGRGDKDIFTVHDILKARGEI

SEQ ID NO: 59 - protein, 268 aa, Artificial Sequence
  source: /note="Description of Artificial Sequence: Synthetic polypeptide"
  source: /note="TrpA"
MERYESLFAQLKERKEGAFVPFVTLGDPGIEQSLKIIDTLIEAGADALELGIPFSDPLADGPTIQNATLRAFAAGVTPAQCFEMLALIRQKHPTIPIGLLMYANLVFNKGIDEFYAECEKVGVDSVLVADVPVEESAPFRQAALRHNVAPIFICPPNADDDLLRQIASYGRGYTYLLSRAGVTGAENRAALPLNHLVAKLKEYNAAPPLQGFGISAPDQVKAAIDAGAAGAISGSAIVKIIEQHINEPEKMLAALKAFVQPMKAATRS

SEQ ID NO: 60 - protein, 350 aa, Artificial Sequence
  source: /note="Description of Artificial Sequence: Synthetic polypeptide"
  source: /note="AroGfbr: feedback resistant 2-dehydro-3-deoxyphosphoheptonate aldolase from E. coli"
MNYQNDDLRIKEIKELLPPVALLEKFPATENAANTVAHARKAIHKILKGNDDRLLVVIGPCSIHDPVAAKEYATRLLTLREELQDELEIVMRVYFEKPRTTVGWKGLINDPHMDNSFQINDGLRIARKLLLDINDSGLPAAGEFLDMITLQYLADLMSWGAIGARTTESQVHRELASGLSCPVGFKNGTDGTIKVAIDAINAAGAPHCFLSVTKWGHSAIVNTSGNGDCHIILRGGKEPNYSAKHVAEVKEGLNKAGLPAQVMIDFSHANSSKQFKKQMDVCTDVCQQIAGGEKAIIGVMVESHLVEGNQSLESGEPLAYGKSITDACIGWDDTDALLRQLASAVKARRG

SEQ ID NO: 61 - protein, 520 aa, Artificial Sequence
  source: /note="Description of Artificial Sequence: Synthetic polypeptide"
  source: /note="TrpEfbr: feedback resistant anthranilate synthase component I from E. coli"
MQTQKPTLELLTCEGAYRDNPTALFHQLCGDRPATLLLEFADIDSKDDLKSLLLVDSALRITALSDTVTIQALSGNGEALLTLLDNALPAGVENEQSPNCRVLRFPPVSPLLDEDARLCSLSVFDAFRLLQNLLNVPKEEREAMFFGGLFSYDLVAGFENLPQLSAENSCPDFCFYLAETLMVIDHQKKSTRIQASLFAPNEEEKQRLTARLNELRQQLTEAAPPLPVVSVPHMRCECNQSDEEFGGVVRLLQKAIRAGEIFQVVPSRRFSLPCPSPLAAYYVLKKSNPSPYMFFMQDNDFTLFGASPESSLKYDATSRQIEIYPIAGTRPRGRRADGSLDRDLDSRIELEMRTDHKELSEHLMLVDLARNDLARICTPGSRYVADLTKVDRYSYVMHLVSRVVGELRHDLDALHAYRACMNMGTLSGAPKVRAMQLIAEAEGRRRGSYGGAVGYFTAHGDLDTCIVIRSALVENGIATVQAGAGVVLDSVPQSEADETRNKARAVLRAIATAHHAQETF

SEQ ID NO: 62 - protein, 410 aa, Artificial Sequence
  source: /note="Description of Artificial Sequence: Synthetic polypeptide"
  source: /note="SerA: 2-oxoglutarate reductase from E. coli Nissle"
MAKVSLEKDKIKFLLVEGVHQKALESLRAAGYTNIEFHKGALDDEQLKESIRDAHFIGLRSRTHLTEDVINAAEKLVAIGCFCIGTNQVDLDAAAKRGIPVFNAPFSNTRSVAELVIGELLLLLRGVPEANAKAHRGVWNKLAAGSFEARGKKLGIIGYGHIGTQLGILAESLGMYVYFYDIENKLPLGNATQVQHLSDLLNMSDVVSLHVPENPSTKNMMGAKEISLMKPGSLLINASRGTVVDIPALCDALASKHLAGAAIDVFPTEPATNSDPFTSPLCEFDNVLLTPHIGGSTQEAQENIGLEVAGKLIKYSDNGSTLSAVNFPEVSLPLHGGRRLMHIHENRPGVLTALNKIFAEQGVNIAAQYLQTSAQMGYVVIDIEADEDVAEKALQAMKAIPGTIRARLLY

SEQ ID NO: 63 - protein, 410 aa, Artificial Sequence
  source: /note="Description of Artificial Sequence: Synthetic polypeptide"
  source: /note="SerAfbr: feedback resistant 2-oxoglutarate reductase from E. coli Nissle"
MAKVSLEKDKIKFLLVEGVHQKALESLRAAGYTNIEFHKGALDDEQLKESIRDAHFIGLRSRTHLTEDVINAAEKLVAIGCFCIGTNQVDLDAAAKRGIPVFNAPFSNTRSVAELVIGELLLLLRGVPEANAKAHRGVWNKLAAGSFEARGKKLGIIGYGHIGTQLGILAESLGMYVYFYDIENKLPLGNATQVQHLSDLLNMSDVVSLHVPENPSTKNMMGAKEISLMKPGSLLINASRGTVVDIPALCDALASKHLAGAAIDVFPTEPATNSDPFTSPLCEFDNVLLTPHIGGSTQEAQENIGLEVAGKLIKYSDNGSTLSAVNFPEVSLPLHGGRRLMHIAEARPGVLTALNKIFAEQGVNIAAQYLQTSAQMGYVVIDIEADEDVAEKALQAMKAIPGTIRARLLY

SEQ ID NO: 64 - protein, 471 aa, Artificial Sequence
  source: /note="Description of Artificial Sequence: Synthetic polypeptide"
  source: /note="TnaA: tryptophanase from E. coli"
MENFKHLPEPFRIRVIEPVKRTTRAYREEAIIKSGMNPFLLDSEDVFIDLLTDSGTGAVTQSMQAAMMRGDEAYSGSRSYYALAESVKNIFGYQYTIPTHQGRGAEQIYIPVLIKKREQEKGLDRSKMVAFSNYFFDTTQGHSQINGCTVRNVYIKEAFDTGVRYDFKGNFDLEGLERGIEEVGPNNVPYIVATITSNSAGGQPVSLANLKVMYSIAKKYDIPVVMDSARFAENAYFIKQREAEYKDWTIEQITRETYKYADMLAMSAKKDAMVPMGGLLCMKDDSFFDVYTECRTLCVVQEGFPTYGGLEGGAMERLAVGLYDGMNLDWLAYRIAQVQYLVDGLEEIGVVCQQAGGHAAFVDAGKLLPHIPADQFPAQALACELYKVAGIRAVEIGSFLLGRDPKTGKQLPCPAELLRLTIPRATYTQTHMDFIIEAFKHVKENAANIKGLTFTYEPKVLRHFTAKLKEV

SEQ ID NO: 65 - protein, 416 aa, Artificial Sequence
  source: /note="Description of Artificial Sequence: Synthetic polypeptide"
  source: /note="Pseudomonas kynureninase, P83788"
MTTRNDCLALDAQDSLAPLRQQFALPEGVIYLDGNSLGARPVAALARAQAVIAEEWGNGLIRSWNSAGWRDLSERLGNRLATLIGARDGEVVVTDTTSINLFKVLSAALRVQATRSPERRVIVTETSNFPTDLYIAEGLADMLQQGYTLRLVDSPEELPQAIDQDTAVVMLTHVNYKTGYMHDMQALTALSHECGALAIWDLAHSAGAVPVDLHQAGADYAIGCTYKYLNGGPGSQAFVWVSPQLCDLVPQPLSGWFGHSRQFAMEPRYEPSNGIARYLCGTQPITSLAMVECGLDVFAQTDMASLRRKSLALTDLFIELVEQRCAAHELTLVTPREHAKRGSHVSFEHPEGYAVIQALIDRGVIGDYREPRIMRFGFTPLYTTFTEVWDAVQILGEILDRKTWAQAQFQVRHSVT

SEQ ID NO: 66 - protein, 465 aa, Artificial Sequence
  source: /note="Description of Artificial Sequence: Synthetic polypeptide"
  source: /note="Human, Q16719"
MEPSSLELPADTVQRIAAELKCHPTDERVALHLDEEDKLRHFRECFYIPKIQDLPPVDLSLVNKDENAIYFLGNSLGLQPKMVKTYLEEELDKWAKIAAYGHEVGKRPWITGDESIVGLMKDIVGANEKEIALMNALTVNLHLLMLSFFKPTPKRYKILLEAKAFPSDHYAIESQLQLHGLNIEESMRMIKPREGEETLRIEDILEVIEKEGDSIAVILFSGVHFYTGQHFNIPAITKAGQAKGCYVGFDLAHAVGNVELYLHDWGVDFACWCSYKYLNAGAGGIAGAFIHEKHAHTIKPALVGWFGHELSTRFKMDNKLQLIPGVCGFRISNPPILLVCSLHASLEIFKQATMKALRKKSVLLTGYLEYLIKHNYGKDKAATKKPVVNIITPSHVEERGCQLTITFSVPNKDVFQELEKRGVVCDKRNPNGIRVAPVPLYNSFHDVYKFTNLLTSILDSAETKN

SEQ ID NO: 67 - protein, 378 aa, Artificial Sequence
  source: /note="Description of Artificial Sequence: Synthetic polypeptide"
  source: /note="Shewanella, Q8E973"
MLLNVKQDFCLAGPGYLLNHSVGRPLKSTEQALKQAFFAPWQESGREPWGQWLGVIDNFTAALASLFNGQPQDFCPQVNLSSALTKIVMSLDRLTRDLTRNGGAVVLMSEIDFPSMGFALKKALPASCELRFIPKSLDVTDPNVWDAHICDDVDLVFVSHAYSNTGQQAPLAQIISLARERGCLSLVDVAQSAGILPLDLAKLQPDFMIGSSVKWLCSGPGAAYLWVNPAILPECQPQDVGWFSHENPFEFDIHDFRYHPTALRFWGGTPSIAPYAIAAHSIEYFANIGSQVMREHNLQLMEPVVQALDNELVSPQEVDKRSGTIILQFGERQPQILAALAAANISVDTRSLGIRVSPHIYNDEADIARLLGVIKANR

SEQ ID NO: 68 - DNA, 1303 bp, Artificial Sequence
  source: /note="Description of Artificial Sequence: Synthetic polynucleotide"
  source: /note="kynU (Pseudomonas)"
atgacgacccgaaatgattgcctagcgttggatgcacaggacagtctggctccgctgcgccaacaatttgcgctgccggagggtgtgatatacctggatggcaattcgctgggcgcacgtccggtagctgcgctggctcgcgcgcaggctgtgatcgcagaagaatggggcaacgggttgatccgttcatggaactctgcgggctggcgtgatctgtctgaacgcctgggtaatcgcctggctaccctgattggtgcgcgcgatggggaagtagttgttactgataccacctcgattaatctgtttaaagtgctgtcagcggcgctgcgcgtgcaagctacccgtagcccggagcgccgtgttatcgtgactgagacctcgaatttcccgaccgacctgtatattgcggaagggttggcggatatgctgcaacaaggttacactctgcgtttggtggattcaccggaagagctgccacaggctatagatcaggacaccgcggtggtgatgctgacgcacgtaaattataaaaccggttatatgcacgacatgcaggctctgaccgcgttgagccacgagtgtggggctctggcgatttgggatctggcgcactctgctggcgctgtgccggtggacctgcaccaagcgggcgcggactatgcgattggctgcacgtacaaatacctgaatggcggcccgggttcgcaagcgtttgtttgggtttcgccgcaactgtgcgacctggtaccgcagccgctgtctggttggttcggccatagtcgccaattcgcgatggagccgcgctacgaaccttctaacggcattgctcgctatctgtgcggcactcagcctattactagcttggctatggtggagtgcggcctggatgtgtttgcgcagacggatatggcttcgctgcgccgtaaaagtctggcgctgactgatctgttcatcgagctggttgaacaacgctgcgctgcacacgaactgaccctggttactccacgtgaacacgcgaaacgcggctctcacgtgtcttttgaacaccccgagggttacgctgttattcaagctctgattgatcgtggcgtgatcggcgattaccgtgagccacgtattatgcgtttcggtttcactcctctgtatactacttttacggaagtttgggatgcagtacaaatcctgggcgaaatcctggatcgtaagacttgggcgcaggctcagtttcaggtgcgccactctgttacttaaaaataaaacgaaaggctcagtcgaaagactgggcctttcgttttatctgttg

SEQ ID NO: 69 - DNA, 1450 bp, Artificial Sequence
  source: /note="Description of Artificial Sequence: Synthetic polynucleotide"
  source: /note="kynU(Human)"
atggagccttcatctttagaactgccagcggacacggtgcagcgcatcgcggcggaactgaagtgccatccgactgatgagcgtgtggcgctgcatctggacgaagaagataaactgcgccactttcgtgaatgtttttatattcctaaaattcaagacttgccgccggtagatttgagtctcgttaacaaagatgaaaacgcgatctactttctgggcaactctctgggtctgcaaccaaaaatggttaaaacgtacctggaggaagaactggataaatgggcaaaaatcgcggcttatggtcacgaagtgggcaagcgtccttggattactggcgacgagtctattgtgggtttgatgaaagatattgtgggcgcgaatgaaaaggaaattgcactgatgaatgctctgaccgttaatctgcacctgctgatgctgtctttttttaaaccgaccccgaaacgctacaaaatactgctggaagcgaaagcgtttccgtcggatcactatgctatagaaagtcaactgcagttgcatggtctgaatatcgaggaatctatgcgcatgattaaaccgcgtgagggtgaagaaacgctgcgtattgaagacattctggaagttattgaaaaagaaggtgattctatcgcagttatactgttttctggcgtgcacttttatacaggtcagcacttcaatatcccggcaatcactaaagcggggcaggcaaaaggctgctatgttggttttgacctggcgcatgcagtggggaatgttgaactgtatctgcacgattggggcgttgatttcgcgtgttggtgtagctacaaatatctgaacgctggcgcgggtggcattgctggcgcttttattcacgaaaaacacgcgcacaccattaaaccggctctggttggctggttcggtcatgagctgagtactcgctttaaaatggataacaaactgcaattgattccgggtgtttgcggcttccgtatcagcaatccgccgattctgctggtttgcagcctgcacgctagtctggaaatctttaagcaggcgactatgaaagcgctgcgcaaaaaatctgtgctgctgaccggctatctggagtatctgatcaaacacaattatggcaaagataaagctgcaactaaaaaaccggtagtgaacattatcaccccctcacacgtggaggagcgcggttgtcagctgactattactttcagtgtacctaataaagatgtgttccaggaactggaaaaacgcggcgttgtttgtgataaacgtaacccgaatggtattcgcgtggctcctgtgccgctgtacaattcattccacgatgtttataaattcaccaacctgctgacttctattctcgacagtgctgagactaaaaattaaaaataaaacgaaaggctcagtcgaaagactgggcctttcgttttatctgttg

SEQ ID NO: 70 - DNA, 1189 bp, Artificial Sequence
  source: /note="Description of Artificial Sequence: Synthetic polynucleotide"
  source: /note="kynU(Shewanella)"
atgctgctgaatgtaaaacaggacttttgcctggcaggcccgggctacctgctgaatcactcggttggccgtccgctgaaatcaactgagcaagcgctgaaacaagcattttttgctccgtggcaagagagcggtcgtgaaccgtggggccagtggctgggtgttattgataatttcactgctgcgctggcatctctgtttaatggtcaaccgcaggatttttgtccgcaggttaacctgagcagcgcgctgactaaaattgtgatgtcactggatcgtctgactcgcgatctgacccgcaatggcggtgctgttgtgctgatgtctgaaatcgatttcccatctatgggcttcgcgttgaaaaaagcgctgccagcgagctgcgaactgcgttttatcccgaaaagtctggacgtgactgatccgaacgtatgggatgcacacatctgtgatgatgtagacctggtttttgtgtctcacgcctatagtaatacgggccaacaggctccgctggcgcaaatcatctctctggcgcgtgaacgtggctgcctgtcactggtggatgtagcgcaatcagcggggattttgccgctggatctggcgaaactgcaaccggacttcatgatcggcagttcggttaaatggctgtgctcgggccctggtgcggcatatctgtgggttaatccggcgattctgccggaatgtcagccgcaggatgtgggctggttttcacatgagaatccctttgaattcgacatccacgatttccgctaccacccgactgcactgcgcttttggggtggtacgccgtcgatcgcgccttatgcgatcgcggcgcactcgatcgaatattttgccaatatcggctcgcaagtgatgcgtgaacacaacctgcaactgatggaaccggtggttcaggcgctggacaatgaactggtgagcccgcaggaagtggataaacgctcaggcactattattctgcaattcggtgaacgtcaaccgcaaattctggcggctctggctgcggcgaacatttcggtggacactcgttctttggggattcgtgttagtccgcacatttataatgatgaggcggacattgcgcgcctgctgggtgtgatcaaagcaaatcgctaaaaataaaacgaaaggctcagtcgaaagactgggcctttcgttttatctgttg

SEQ ID NO: 71 - DNA, 1242 bp, Artificial Sequence
  source: /note="Description of Artificial Sequence: Synthetic polynucleotide"
  source: /note="nupC (polynucleotide)"
gtgcacggaaatttaacctgcctcatatttggagcaaatatggaccgcgtccttcattttgtactggcacttgccgttgttgcgattctcgcactgctggtaagcagcgaccgcaaaaaaattcgtatccgttatgttattcaactgcttgttatcgaagtgttactggcgtggttcttcctgaactccgacgttggtctgggcttcgtgaaaggcttctccgaaatgttcgaaaaactgctcggttttgccaacgaagggactaacttcgtctttggtagcatgaatgatcaaggcctggcattcttcttcctgaaagtgctgtgcccaatcgtctttatctctgcgctgatcggtattctccagcatattcgcgtattgccggtgattatccgcgcaattggtttcctgctctccaaagtcaacggcatgggcaaactggaatcctttaacgccgtcagctccctgattctgggtcagtctgaaaactttattgcctataaagatatcctcggcaaaatctcccgcaatcgtatgtacaccatggcagcaacggcgatgtccaccgtgtcgatgtccatcgttggtgcatatatgaccatgctggagccgaaatacgtcgttgcggcgctggtactgaacatgttcagcacctttatcgtgctgtcgctgatcaacccttaccgtgttgatgccagtgaagaaaacattcagatgtccaacctgcacgaaggtcagagcttcttcgaaatgctgggtgaatacattctggcaggtttcaaagttgccattatcgttgccgcgatgctgatcggctttatcgccctgatcgctgcactgaacgctctgtttgctaccgtgactggctggtttggctacagcatctccttccagggcatcctgggttacatcttctatccgattgcatgggtgatgggtgttccttccagtgaagcactgcaagtgggcagtatcatggcgaccaaactggtttccaacgagttcgttgcgatgatggatctgcagaaaattgcttccacgctctctccgcgtgcggaaggcatcatctctgtgttcctggtttccttcgctaacttctcttcaatcgggattatcgcgggtgcggttaaaggcctgaatgaagagcaaggtaacgtggtttctcgcttcggtctgaaactggtttacggctctaccctggtgagtgtgctgtctgcgtcaatcgcagcactggtgctgtaa

SEQ ID NO: 72 - DNA, 2259 bp, Artificial Sequence
  source: /note="Description of Artificial Sequence: Synthetic polynucleotide"
  source: /note="xdhA"
atgcgcgtcgatgccattgctaaggtcaccgggcgggcacgatatactgacgattatattatggcgggcatgtgttacgcgaaatatgtacgtagccctatcgcacatggttatgctgtaaatattaatgatgaacaagccaggagtttgccgggcgtcctggcgatttttacctgggaagatgtgccagaaatcccattcgccacggcagggcatgcctggacacttgacgaaaacaagcgcgataccgccgatcgtgccctgctaacgcgtcatgttcgtcatcatggtgacgccgttgccatcgtcgtggcccgcgatgaactcacggcagaaaaagcggcgcaattggtcagcattgagtggcaagaattacccgttatcacctcgccagaagcggcgctggcagaagacgctgcaccaatccataacggtggcaatttactgaaacaaagcacgatgtcgacgggtaatgtccaacaaacaatcgatgccgccgactaccaggtacaggggcactatcagactcccgttattcaacattgtcatatggaaagcgtgacatcgctggcatggatggaggatgactcgcgaattaccatcgtttccagcacccagatcccgcacattgttcgccgcgtggttggtcaggcgctggatattccctggtcatgcgtacgagtcatcaaaccgtttatcggtggcggttttggtaataaacaggatgtactggaagagccaatggcggcattcctgaccagcaaacttggcggcattccggtgaaagtttcccttagccgtgaagagtgtttcctcgcaacccgtacccgccacgcttttactattgacgggcaaatgggcgtgaaccgcgacggaacattgaaaggttatagtctggatgttctgtctaacaccggcgcttatgcatctcacgggcactccattgcttctgctggggggaataaagtcgcttacctttatcctcgttgtgcctacgcttacagttcaaagacctgctataccaacctcccctcggctggtgcgatgcgtggttatggcgcgccacaagtcgtatttgccgttgagtctatgcttgatgatgccgcgacagcgttaggtattgatcctgttgaaattcgtttacgcaacgccgcccgcgaaggagatgctaatccgctcacgggaaaacgtatttacagcgcagggttgccggagtgtcttgaaaaaggccggaaaatctttgaatgggaaaaacgccgtgcagagtgccagaaccagcaaggcaatttacgtcgtggcgttggcgtcgcctgttttagctacacctctaacacctggcctgtcggcgtagaaatagcaggcgcgcgcctgttgatgaatcaggatggaaccatcaacgtgcaaagcggcgcgacggaaatcggccagggtgccgacaccgtgttctcgcaaatggtggcagaaaccgtgggagttccggtcagcgatgttcacgttatttcaacccaagataccgacgttacaccattcgaccccggcgcatttgcctcacgtcagagctatgttgccgcgcctgcgctgcgcagtgcagcactgttattaaaagagaaaatcatcgctcacgccgcagtcatgctacatcagtcagcgatgaatctgaccctgataaaaggccatatcgtgctgattgaaagaccggaagaaccgttaatgtcgttaaaagatttggcgatggacgctttctaccaccctgaacgcggcgggcagctctctgccgaaagctccatcaaaaccaccactaacccaccggcgtttggctgtacctttgttgatctgacggtcgatattgcactgtgcaaagtcaccatcaaccgcatcctcaacgttcatgattcgggccatattcttaatccgctgctggcagaaggtcaggtacacggcggaatgggaatgggcattggctgggcgctatttgaagagatgatcatcgatgcgaaaagcggcgtggtccgtaaccccaatctgctggattacaaaatgccgaccatgccggatctgccacaactggaaagcgcgttcgtcgaaatcaatgagccgcaatcagcatacggacataagtcactgggtgagccccccataattcctgtagccgctgctattcgtaacgcggtgaagatggctaccggtgttgcaatcaatacactgccgctaacgccaaaacgattatatgaagaattccatctggcaggattgatttga

SEQ ID NO: 73 - DNA, 879 bp, Artificial Sequence
  source: /note="Description of Artificial Sequence: Synthetic polynucleotide"
  source: /note="xdhB"
atgtttgattttgcttcttaccatcgcgcaaccacccttgccgatgccatcaccctgctggctgacaatccgcaggccaaattgcttgccggtggcactgacgtactgatacagcttcaccatcacaatgaccgctatcgccatattgttgatatccacaatctggcagagcttcagggaataacacaggcggaagatggcgcgctgcgaatcggctctgcgacaacatttactcagctcattgaagatcccgtaatccaacgcaatctcccggcgttatgtgctgcggctgcatcaatcgccgggccgcagatccgtaatgtcgccacctacggcggaaatatttgcaacggtgccaccagcgcagattctgccacgccaacgctaatttatgacgcgaaactggagctccactccccacgcggtgttcgtttcgtcccgattaatggctttcacaccgggccgggcaaagtgtctcttgagcatgacgaaatccttgtcgcctttcattttccgccacagccgaaagaacacgcgggcagcgcgcattttaaatatgccatgcgcgacgcaatggatatttcaacaattggctgcgccgcacattgccgactggataacggcaatttcagcgaattacgcctggcatttggtgttgccgcgccaacgccgattcgctgccaacatgccgaacagactgcacaaaatgcgccattaaacctgcaaacgctggaagccatcagcgaatcagtcctgcaagatgtcgccccgcgttcttcatggcgggccagtaaagagtttcgtctgcatctcatccagacgatgaccaaaaaagtgattagcgaagccgtcgccgcggcggggggaaaattgcaatga

SEQ ID NO: 74 - DNA, 480 bp, Artificial Sequence
  source: /note="Description of Artificial Sequence: Synthetic polynucleotide"
  source: /note="xdhC"
atgaatcacagcgaaacaattaccatcgaatgcaccattaacgggatgccttttcagcttcacgccgcgccaggaatgccgctttcggaactactccgagaacaagggcttcttagtgtcaaacaaggttgctgcgtaggcgaatgcggtgcctgtacggtgctggtcgacggcactgcgatagacagttgcttattccttgcgacctgggctgaaggaaaagagatccgcacgctggaaggtgaagcgaaaggcggtaaactttctcatgtccaactggcttatgcgaaatctggtgcagtgcaatgcgggttttgtacgccgggcctgattatggctaccacggcgatgctggcaaaaccacgcgaaaaaccattaaccattacggaaattcgtcgtggactggcgggaaatctttgtcgctgcacggggtatcagatgattgtaaatacagttctggattgcgagaaaacgaagtaa

SEQ ID NO: 75 - DNA, 1002 bp, Artificial Sequence
  source: /note="Description of Artificial Sequence: Synthetic polynucleotide"
  source: /note="Add"
atgattgataccaccctgccattaactgatatccatcgccaccttgatggcaacattcgtccccagaccattcttgaacttggccgccagtataatatctcgcttcctgcacaatccctggaaacactgattccccacgttcaggtcattgccaacgaacccgatctggtgagctttctgactaaacttgactggggcgttaaagttctcgcctctcttgatgcctgccgccgcgtggcatttgaaaacattgaagatgcagcccgtaacggcctgcactatgtcgagctgcgtttttcaccaggctacatggcaatggcacatcagctgcctgtagcgggtgttgtcgaagcggtgatcgatggcgtacgtgaaggttgccgcacctttggtgtgcaggcgaagcttatcggtattatgagccggaccttcggcgaagccgcctgtcagcaagagctggaggcctttttagcccaccgtgaccagattaccgcacttgatttagccggtgatgaacttggtttcccgggaagtctgttcctttctcatttcaaccgcgcgcgtgatgcgggctggcatattaccgtccatgcaggcgaagctgccggaccggaaagcatctggcaggcgattcgtgaactgggggcggagcgtattggacatggcgtaaaagccattgaagatcgggcgctgatggattttctcgccgagcaacaaattggtattgaatcctgtctgacctccaatattcagaccagcaccgtggcggatctggctgcacatccgctgaaaacgttccttgagcatggcattcgtgccagcattaacactgacgatccaggcgtgcagggagtggatatcattcacgaatataccgttgccgcgccagctgctgggttatcccgcgagcaaatccgccaggcacagattaatggtctggaaatggctttcctcagcgcagaggaaaaacgcgcactgcgagaaaaagtcgccgcgaagtaa

SEQ ID NO: 76 - DNA, 834 bp, Artificial Sequence
  source: /note="Description of Artificial Sequence: Synthetic polynucleotide"
  source: /note="xapA"
atgtatcaggctcagttttctcataacccactgtattgcgtagatattatcaagacttataaacctgatttcacgccacgagtggcctttattttaggttccgggctgggcgcgctggccgatcagattgagaacgcggtcgcaatttcctacgaaaagctgcctgggttcccggtaagtaccgtacacggtcatgcgggtgagctggtgctgggttatctccagggggtgccagtggcgtgtatgaaaggtcgcggacatttctacgaaggtcgtgggatgaccatcatgacggatgcaatccgtacctttaagttgctgggctgcgagttgctgttctgcaccaatgcggctggctcactgcgccctgaagtgggggccggcagtctggtcgcattgaaagatcacatcaacaccatgccgggaacgccgatggtgggtcttaatgatgaacgttttggtgagcgcttcttctcgctggcgaatgcctacgatgcggaataccgcgcactgttacaaaaagtggcgaaagaagaggggttccctctgacggagggcgtgttcgtctcatatccggggccgaatttcgagactgcggcggaaattcgcatgatgcaaattattggtggggatgttgttggtatgtctgtggtgcctgaggttatttcagctcgccattgcgaacttaaagtcgttgcggtctctgcgattaccaacatggcggaaggtctgagtgacgtgaagctttctcatgcccaaacgctggcagcagcggaactctcaaagcaaaactttattaatcttatttgcggctttctgcgcaaaattgcctga

SEQ ID NO: 77 - DNA, 720 bp, Artificial Sequence
  source: /note="Description of Artificial Sequence: Synthetic polynucleotide"
  source: /note="deoD"
atggctaccccacacattaatgcagaaatgggcgatttcgctgacgtagttttgatgccaggcgacccgctgcgtgcgaagtatattgctgaaactttccttgaagatgcccgtgaagtgaacaacgttcgcggtatgctgggcttcaccggtacttacaaaggccgcaaaatttccgtaatgggtcacggtatgggtatcccgtcctgctccatctacaccaaagaactgatcaccgatttcggcgtgaagaaaattatccgcgtgggttcctgtggcgcagttctgccgcacgtaaaactacgcgacgtcgttatcggtatgggtgcctgcaccgattccaaagttaaccgcatccgttttaaagaccatgactttgccgctatcgctgactttgacatggtgcgtaacgcggtagacgcggctaaagcactgggcgttgatgctcgcgtgggtaacctgttctccgctgacctgttctactctccggacggcgaaatgttcgacgtgatggaaaaatacggcatcctcggcgtggaaatggaagcggctggtatctacggcgtcgctgcagaatttggcgcgaaagccctgaccatctgcaccgtgtctgaccacatccgcactcacgagcagaccactgccgctgagcgtcagaccaccttcaacgacatgatcaaaatcgcactggaatccgttctgctgggcgataaagagtaa

SEQ ID NO: 78 - protein, 413 aa, Artificial Sequence
  source: /note="Description of Artificial Sequence: Synthetic polypeptide"
  source: /note="NupC (polypeptide)"
VHGNLTCLIFGANMDRVLHFVLALAVVAILALLVSSDRKKIRIRYVIQLLVIEVLLAWFFLNSDVGLGFVKGFSEMFEKLLGFANEGTNFVFGSMNDQGLAFFFLKVLCPIVFISALIGILQHIRVLPVIIRAIGFLLSKVNGMGKLESFNAVSSLILGQSENFIAYKDILGKISRNRMYTMAATAMSTVSMSIVGAYMTMLEPKYVVAALVLNMFSTFIVLSLINPYRVDASEENIQMSNLHEGQSFFEMLGEYILAGFKVAIIVAAMLIGFIALIAALNALFATVTGWFGYSISFQGILGYIFYPIAWVMGVPSSEALQVGSIMATKLVSNEFVAMMDLQKIASTLSPRAEGIISVFLVSFANFSSIGIIAGAVKGLNEEQGNVVSRFGLKLVYGSTLVSVLSASIAALVL

SEQ ID NO: 79 - protein, 752 aa, Artificial Sequence
  source: /note="Description of Artificial Sequence: Synthetic polypeptide"
  source: /note="xdhA (polypeptide)"
MRVDAIAKVTGRARYTDDYIMAGMCYAKYVRSPIAHGYAVNINDEQARSLPGVLAIFTWEDVPEIPFATAGHAWTLDENKRDTADRALLTRHVRHHGDAVAIVVARDELTAEKAAQLVSIEWQELPVITSPEAALAEDAAPIHNGGNLLKQSTMSTGNVQQTIDAADYQVQGHYQTPVIQHCHMESVTSLAWMEDDSRITIVSSTQIPHIVRRVVGQALDIPWSCVRVIKPFIGGGFGNKQDVLEEPMAAFLTSKLGGIPVKVSLSREECFLATRTRHAFTIDGQMGVNRDGTLKGYSLDVLSNTGAYASHGHSIASAGGNKVAYLYPRCAYAYSSKTCYTNLPSAGAMRGYGAPQVVFAVESMLDDAATALGIDPVEIRLRNAAREGDANPLTGKRIYSAGLPECLEKGRKIFEWEKRRAECQNQQGNLRRGVGVACFSYTSNTWPVGVEIAGARLLMNQDGTINVQSGATEIGQGADTVFSQMVAETVGVPVSDVHVISTQDTDVTPFDPGAFASRQSYVAAPALRSAALLLKEKIIAHAAVMLHQSAMNLTLIKGHIVLIERPEEPLMSLKDLAMDAFYHPERGGQLSAESSIKTTTNPPAFGCTFVDLTVDIALCKVTINRILNVHDSGHILNPLLAEGQVHGGMGMGIGWALFEEMIIDAKSGVVRNPNLLDYKMPTMPDLPQLESAFVEINEPQSAYGHKSLGEPPIIPVAAAIRNAVKMATGVAINTLPLTPKRLYEEFHLAGLI

SEQ ID NO: 80 - protein, 292 aa, Artificial Sequence
  source: /note="Description of Artificial Sequence: Synthetic polypeptide"
  source: /note="xdhB (polypeptide)"
MFDFASYHRATTLADAITLLADNPQAKLLAGGTDVLIQLHHHNDRYRHIVDIHNLAELQGITQAEDGALRIGSATTFTQLIEDPVIQRNLPALCAAAASIAGPQIRNVATYGGNICNGATSADSATPTLIYDAKLELHSPRGVRFVPINGFHTGPGKVSLEHDEILVAFHFPPQPKEHAGSAHFKYAMRDAMDISTIGCAAHCRLDNGNFSELRLAFGVAAPTPIRCQHAEQTAQNAPLNLQTLEAISESVLQDVAPRSSWRASKEFRLHLIQTMTKKVISEAVAAAGGKLQ

SEQ ID NO: 81 - protein, 292 aa, Artificial Sequence; identical to SEQ ID NO: 80
  source: /note="Description of Artificial Sequence: Synthetic polypeptide"
  source: /note="xdhC (polypeptide)"

SEQ ID NO: 82 - protein, 333 aa, Artificial Sequence
  source: /note="Description of Artificial Sequence: Synthetic polypeptide"
  source: /note="Add (polypeptide)"
MIDTTLPLTDIHRHLDGNIRPQTILELGRQYNISLPAQSLETLIPHVQVIANEPDLVSFLTKLDWGVKVLASLDACRRVAFENIEDAARNGLHYVELRFSPGYMAMAHQLPVAGVVEAVIDGVREGCRTFGVQAKLIGIMSRTFGEAACQQELEAFLAHRDQITALDLAGDELGFPGSLFLSHFNRARDAGWHITVHAGEAAGPESIWQAIRELGAERIGHGVKAIEDRALMDFLAEQQIGIESCLTSNIQTSTVADLAAHPLKTFLEHGIRASINTDDPGVQGVDIIHEYTVAAPAAGLSREQIRQAQINGLEMAFLSAEEKRALREKVAAK

SEQ ID NO: 83 - protein, 277 aa, Artificial Sequence
  source: /note="Description of Artificial Sequence: Synthetic polypeptide"
  source: /note="xapA (polypeptide)"
MYQAQFSHNPLYCVDIIKTYKPDFTPRVAFILGSGLGALADQIENAVAISYEKLPGFPVSTVHGHAGELVLGYLQGVPVACMKGRGHFYEGRGMTIMTDAIRTFKLLGCELLFCTNAAGSLRPEVGAGSLVALKDHINTMPGTPMVGLNDERFGERFFSLANAYDAEYRALLQKVAKEEGFPLTEGVFVSYPGPNFETAAEIRMMQIIGGDVVGMSVVPEVISARHCELKVVAVSAITNMAEGLSDVKLSHAQTLAAAELSKQNFINLICGFLRKIA

SEQ ID NO: 84 - protein, 239 aa, Artificial Sequence
  source: /note="Description of Artificial Sequence: Synthetic polypeptide"
  source: /note="deoD (polypeptide)"
MATPHINAEMGDFADVVLMPGDPLRAKYIAETFLEDAREVNNVRGMLGFTGTYKGRKISVMGHGMGIPSCSIYTKELITDFGVKKIIRVGSCGAVLPHVKLRDVVIGMGACTDSKVNRIRFKDHDFAAIADFDMVRNAVDAAKALGVDARVGNLFSADLFYSPDGEMFDVMEKYGILGVEMEAAGIYGVAAEFGAKALTICTVSDHIRTHEQTTAAERQTTFNDMIKIALESVLLGDKE

SEQ ID NO: 85 - DNA, 60 bp, Artificial Sequence
  source: /note="Description of Artificial Sequence: Synthetic oligonucleotide"
  source: /note="argA WT"
gcaaaaaaacagaataaaaatacaataatttcgaataatcatgcaaagaggtgtaccgtg

SEQ ID NO: 86 - DNA, 60 bp, Artificial Sequence
  source: /note="Description of Artificial Sequence: Synthetic oligonucleotide"
  source: /note="argA mutant"
gcaaaaaaacactttaaaaacttaataatttcctttaatcacttaaagaggtgtaccgtg

SEQ ID NO: 87 - DNA, 76 bp, Artificial Sequence
  source: /note="Description of Artificial Sequence: Synthetic oligonucleotide"
  source: /note="argI WT"
agacttgcaaatgaataatcatccatatagattgaattttaattcattaaggcgttagccacaggagggatctatg

SEQ ID NO: 88 - DNA, 76 bp, Artificial Sequence
  source: /note="Description of Artificial Sequence: Synthetic oligonucleotide"
  source: /note="argI mutant"
agacttgcaaacttatacttatccatatagattttgttttaatttgttaaggcgttagccacaggagggatctatg

SEQ ID NO: 89 - DNA, 160 bp, Artificial Sequence
  source: /note="Description of Artificial Sequence: Synthetic polynucleotide"
  source: /note="argCBH WT"
tcattgttgacacacctctggtcatgatagtatcaatattcatgcagtatttatgaataaaaatacactaacgttgagcgtaataaaacccaccagccgtaaggtgaatgttttacgtttaacctggcaaccagacataagaaggtgaatagccccgatg

SEQ ID NO: 90 - DNA, 160 bp, Artificial Sequence
  source: /note="Description of Artificial Sequence: Synthetic polynucleotide"
  source: /note="argCBH mutant"
tcattgttgacacacctctggtcatgatagtatcaaacttcatgggatatttatctttaaaaatacttgaacgttgagcgtaataaaacccaccagccgtaaggtgaatgttttacgtttaacctggcaaccagacataagaaggtgaatagccccgatg

SEQ ID NO: 91 - DNA, 160 bp, Artificial Sequence
  source: /note="Description of Artificial Sequence: Synthetic polynucleotide"
  source: /note="argE WT"
catcggggctattcaccttcttatgtctggttgccaggttaaacgtaaaacattcaccttacggctggtgggttttattacgctcaacgttagtgtatttttattcataaatactgcatgaatattgatactatcatgaccagaggtgtgtcaacaatga

SEQ ID NO: 92 - DNA, 160 bp, Artificial Sequence
  source: /note="Description of Artificial Sequence: Synthetic polynucleotide"
  source: /note="argE mutant"
catcggggctattcaccttcttatgtctggttgccaggttaaacgtaaaacattcaccttacggctggtgggttttattacgctcaacgttcaagtatttttaaagataaatatcccatgaagtttgatactatcatgaccagaggtgtgtcaacaatga

SEQ ID NO: 93 - DNA, 81 bp, Artificial Sequence
  source: /note="Description of Artificial Sequence: Synthetic oligonucleotide"
  source: /note="carAB WT"
agcagatttgcattgatttacgtcatcattgtgaattaatatgcaaataaagtgagtgaatattctctggagggtgttttg

SEQ ID NO: 94 - DNA, 81 bp, Artificial Sequence
  source: /note="Description of Artificial Sequence: Synthetic oligonucleotide"
  source: /note="carAB mutant"
agcagatttgcattgatttacgtcatcattgtcttttaatatcttaataactggagtgacgtttctctggagggtgttttg

SEQ ID NO: 95 - DNA, 88 bp, Artificial Sequence
  source: /note="Description of Artificial Sequence: Synthetic oligonucleotide"
  source: /note="argD WT"
tttctgattgccattcagtgattttttatgcatattttgtgattataatttcatatttatttatgcgtaacagggtgatcatgagatg

SEQ ID NO: 96 - DNA, 88 bp, Artificial Sequence
  source: /note="Description of Artificial Sequence: Synthetic oligonucleotide"
  source: /note="argD mutant"
tttctgattgccattcagtctttttttacttatattttgtctttataatcttatatttatttatgcgtaacagggtgatcatgagatg

SEQ ID NO: 97 - DNA, 219 bp, Artificial Sequence
  source: /note="Description of Artificial Sequence: Synthetic polynucleotide"
  source: /note="argG WT"
ctaatcacgtgaatgaatatccagttcactttcatttgttgaatacttttaccttctcctgctttcccttaagcgcattattttacaaaaaacacactaaactcttcctgtctccgataaaagatgattaaatgaaaactcatttattttgcataaaaattcagtgaaagcagaaatccaggctcatcatcagttaattaagcagggtgttattttatg

SEQ ID NO: 98 - DNA, 219 bp, Artificial Sequence
  source: /note="Description of Artificial Sequence: Synthetic polynucleotide"
  source: /note="argG mutant"
ctaatcaccttaatgaatcttcagttcactttcatttgttgaatacttttaccttctcctgctttcccttaagcgcattattttacaaaaaacacactaaactcttcctgtctccgataaaagatgatcttatgaaaacctttttatttcttataaaaatcttgtgaaagcagaaatccaggctcatcatcagttaattaagcagggtgttattttatg

SEQ ID NO: 99 - DNA, 233 bp, Artificial Sequence
  source: /note="Description of Artificial Sequence: Synthetic polynucleotide"
  source: /note="argG mutant"
cctgaaacgtggcaaattctactcgttttgggtaaaaaatgcaaatactgctgggatttggtgtaccgagacgggacgtaaaatctgcaggcattatagtgatccacgccacattttgtcaacgtttattgctaatcattgacggctagctcagtcctaggtacagtgctagcacccgtttttttgggctagaaataattttgtttaactttaagaaggagatatacataccc

SEQ ID NO: 100 - DNA, 1053 bp, Artificial Sequence
  source: /note="Description of Artificial Sequence: Synthetic polynucleotide"
  source: /note="Wild-type argG"
gtgatccacgccacattttgtcaacgtttattgctaatcacgtgaatgaatatccagttcactttcatttgttgaatacttttaccttctcctgctttcccttaagcgcattattttacaaaaaacacactaaactcttcctgtctccgataaaagatgattaaatgaaaactcatttattttgcataaaaattcagtgaaagcagaaatccaggctcatcatcagttaattaagcagggtgttattttatgacgacgattctcaagcatctcccggtaggtcaacgtattggtatcgctttttccggcggtctggacaccagtgccgcactgctgtggatgcgacaaaagggagcggttccttatgcatatactgcaaacctgggccagccagacgaagaggattatgatgcgatccctcgtcgtgccatggaatacggcgcggagaacgcacgtctgatcgactgccgcaaacaactggtggccgaaggtattgccgctattcagtgtggcgcatttcataacaccactggtggactgacctatttcaacacgacgccgctgggccgcgccgtgaccggcaccatgctggttgctgctatgaaagaagatggcgtgaatatctggggtgacggcagcacctataaaggaaacgatatcgaacgtttctaccgttacggtctgctgaccaatgctgaactgcagatttacaaaccgtggcttgatactgactttattgatgaactgggtggccgtcatgagatgtctgaatttatgattgcctgcggtttcgactacaaaatgtctgtcgaaaaagcttactccacggactccaacatgcttggtgcaacgcatgaagcgaaggatctggaatacctcaactccagcgtcaaaatcgtcaacccaattatgggcgtgaagttttgggatgagagcgtgaaaatcccggcagaagaagtcacagtacgctttgagcaaggtcatccggtggcgctgaacggtaaaacctttagcgacgacgtagaaatgatgctggaagctaaccgcatcggc

SEQ ID NO: 101 - DNA, 734 bp, Artificial Sequence
  source: /note="Description of Artificial Sequence: Synthetic polynucleotide"
  source: /note="Constitutive argG"
ttgacggctagctcagtcctaggtacagtgctagcacccgtttttttgggctagaaataattttgtttaactttaagaaggagatatacatacccatgacgacgattctcaagcatctcccggtaggtcaacgtattggtatcgctttttccggcggtctggacaccagtgccgcactgctgtggatgcgacaaaagggagcggttccttatgcatatactgcaaacctgggccagccagacgaagaggattatgatgcgatccctcgtcgtgccatggaatacggcgcggagaacgcacgtctgatcgactgccgcaaacaactggtggccgaaggtattgccgctattcagtgtggcgcatttcataacaccactggtggactgacctatttcaacacgacgccgctgggccgcgccgtgaccggcaccatgctggttgctgctatgaaagaagatggcgtgaatatctggggtgacggcagcacctataaaggaaacgatatcgaacgtttctaccgttacggtctgctgaccaatgctgaactgcagatttacaaaccgtggcttgatactgactttattgatgaactgggtggccgtcatgagatgtctgaatttatgattgcctgcggtttcgactacaaaatgtctgtcgaaaaagcttactccacggactccaacatgcttggtgcaacgcatgaagcgaaggatctggaatacctcaactccagc

SEQ ID NO: 102 - DNA, 1332 bp, Artificial Sequence
  source: /note="Description of Artificial Sequence: Synthetic polynucleotide"
  source: /note="Nucleotide sequence of exemplary argAfbr sequence"
atggtaaaggaacgtaaaaccgagttggtcgagggattccgccattcggttccctgtatcaatacccaccggggaaaaacgtttgtcatcatgctcggcggtgaagccattgagcatgagaatttctccagtatcgttaatgatatcgggttgttgcacagcctcggcatccgtctggtggtggtctatggcgcacgtccgcagatcgacgcaaatctggctgcgcatcaccacgaaccgctgtatcacaagaatatacgtgtgaccgacgccaaaacactggaactggtgaagcaggctgcgggaacattgcaactggatattactgctcgcctgtcgatgagtctcaataacacgccgctgcagggcgcgcatatcaacgtcgtcagtggcaattttattattgcccagccgctgggcgtcgatgacggcgtggattactgccatagcgggcgtatccggcggattgatgaagacgcgatccatcgtcaactggacagcggtgcaatagtgctaatggggccggtcgctgtttcagtcactggcgagagctttaacctgacctcggaagagattgccactcaactggccatcaaactgaaagctgaaaagatgattggtttttgctcttcccagggcgtcactaatgacgacggtgatattgtctccgaacttttccctaacgaagcgcaagcgcgggtagaagcccaggaagagaaaggcgattacaactccggtacggtgcgctttttgcgtggcgcagtgaaagcctgccgcagcggcgtgcgtcgctgtcatttaatcagttatcaggaagatggcgcgctgttgcaagagttgttctcacgcgacggtatcggtacgcagattgtgatggaaagcgccgagcagattcgtcgcgcaacaatcaacgatattggcggtattctggagttgattcgcccactggagcagcaaggtattctggtacgccgttctcgcgagcagctggagatggaaatcgacaaattcaccattattcagcgcgataacacgactattgcctgcgccgcgctctatccgttcccggaagagaagattggggaaatggcctgtgtggcagttcacccggattaccgcagttcatcaaggggtgaagttctgctggaacgcattgccgctcaggctaagcagagcggcttaagcaaattgtttgtgctgaccacgcgcagtattcactggttccaggaacgtggatttaccccagtggatattgatttactgcccgagagcaaaaagcagttgtacaactaccagcgtaaatccaaagtgttgatggcggatttagggtaa

SEQ ID NO: 103 - protein, 443 aa, Artificial Sequence
  source: /note="Description of Artificial Sequence: Synthetic polypeptide"
  source: /note="Polypeptide sequence of exemplary argAfbr sequence"
MVKERKTELVEGFRHSVPCINTHRGKTFVIMLGGEAIEHENFSSIVNDIGLLHSLGIRLVVVYGARPQIDANLAAHHHEPLYHKNIRVTDAKTLELVKQAAGTLQLDITARLSMSLNNTPLQGAHINVVSGNFIIAQPLGVDDGVDYCHSGRIRRIDEDAIHRQLDSGAIVLMGPVAVSVTGESFNLTSEEIATQLAIKLKAEKMIGFCSSQGVTNDDGDIVSELFPNEAQARVEAQEEKGDYNSGTVRFLRGAVKACRSGVRRCHLISYQEDGALLQELFSRDGIGTQIVMESAEQIRRATINDIGGILELIRPLEQQGILVRRSREQLEMEIDKFTIIQRDNTTIACAALYPFPEEKIGEMACVAVHPDYRSSSRGEVLLERIAAQAKQSGLSKLFVLTTRSIHWFQERGFTPVDIDLLPESKKQLYNYQRKSKVLMADLG

SEQ ID NO: 104 - protein, 26 aa, Artificial Sequence
  source: /note="Description of Artificial Sequence: Synthetic peptide"
  source: /note="melittin"
GIGAVLKVLTTGLPALISWIKRKKQQ

SEQ ID NO: 105 - protein, 37 aa, Artificial Sequence
  source: /note="Description of Artificial Sequence: Synthetic polypeptide"
  source: /note="LL-37"
LLGDFFRKSKEKIGKEFKRIVQRIKDFLRNLVPRTES

SEQ ID NO: 106 - protein, 35 aa, Artificial Sequence
  source: /note="Description of Artificial Sequence: Synthetic polypeptide"
  source: /note="cecropin B"
KWKVFKKIEKMGRNIRNGIVKAGPAIAVLGEAKAL

SEQ ID NO: 107 - protein, 24 aa, Artificial Sequence
  source: /note="Description of Artificial Sequence: Synthetic peptide"
  source: /note="Magainin 2"
GIGKFLHSAKKFGKAFVGEEIMNS

SEQ ID NO: 108 - protein, 10 aa, Artificial Sequence
  source: /note="Description of Artificial Sequence: Synthetic peptide"
  source: /note="EZH2"
FINDEIFVEL

SEQ ID NO: 109 - protein, 9 aa, Artificial Sequence
  source: /note="Description of Artificial Sequence: Synthetic peptide"
  source: /note="EZH2"
KYDCFLHPF

SEQ ID NO: 110 - protein, 9 aa, Artificial Sequence
  source: /note="Description of Artificial Sequence: Synthetic peptide"
  source: /note="EZH2"
KYVGIEREM

SEQ ID NO: 111 - protein, 9 aa, Artificial Sequence
  source: /note="Description of Artificial Sequence: Synthetic peptide"
  source: /note="glypican-3"
EYILSLEEL

SEQ ID NO: 112 - DNA, 18 bp, Artificial Sequence
  source: /note="Description of Artificial Sequence: Synthetic oligonucleotide"
  source: /note="consensus sequence"
ttgttgayryrtcaacwa

SEQ ID NO: 113 - DNA, 15 bp, Artificial Sequence
  source: /note="Description of Artificial Sequence: Synthetic oligonucleotide"
  source: /note="consensus sequence"
  modified_base (8)..(8): a, c, g or t
ttataatnattataa

SEQ ID NO: 114 - DNA, 22 bp, Artificial Sequence
  source: /note="Description of Artificial Sequence: Synthetic oligonucleotide"
  source: /note="LacO"
ggaattgtgagcgctcacaatt

SEQ ID NO: 115 - DNA, 24 bp, Artificial Sequence
  source: /note="Description of Artificial Sequence: Synthetic oligonucleotide"
  source: /note="UP element helps recruit RNA polymerase"
ggaaaatttttttaaaaaaaaaac

SEQ ID NO: 116 - DNA, 25 bp, Artificial Sequence
  source: /note="Description of Artificial Sequence: Synthetic oligonucleotide"
  source: /note="RBS"
ttatataaaagtgggaggtgcccga

SEQ ID NO: 117 - protein, 9 aa, Artificial Sequence
  source: /note="Description of Artificial Sequence: Synthetic peptide"
  source: /note="MAGE-A1"
KVLEYVIKV

SEQ ID NO: 118 - protein, 10 aa, Artificial Sequence
  source: /note="Description of Artificial Sequence: Synthetic peptide"
  source: /note="Melan-A / MART-1"
  VARIANT (1)..(1): /replace=" "
  MISC_FEATURE (1)..(10): /note="Variant residues given in the sequence have no preference with respect to those in the annotations for variant positions"
EAAGIGILTV

SEQ ID NO: 119 - protein, 9 aa, Artificial Sequence
  source: /note="Description of Artificial Sequence: Synthetic peptide"
  source: /note="Melan-A / MART-1"
ILTVILGVL

SEQ ID NO: 120 - protein, 11 aa, Artificial Sequence
  source: /note="Description of Artificial Sequence: Synthetic peptide"
  source: /note="Melan-A / MART-1"
  VARIANT (11)..(11): /replace=" "
  MISC_FEATURE (1)..(11): /note="Variant residues given in the sequence have no preference with respect to those in the annotations for variant positions"
AEEAAGIGILT

SEQ ID NO: 121 - protein, 11 aa, Artificial Sequence
  source: /note="Description of Artificial Sequence: Synthetic peptide"
  source: /note="Melan-A / MART-1"
RNGYRALMDKS

SEQ ID NO: 122 - protein, 12 aa, Artificial Sequence
  source: /note="Description of Artificial Sequence: Synthetic peptide"
  source: /note="Melan-A / MART-1"
EEAAGIGILTVI

SEQ ID NO: 123 - DNA, 46 bp, Artificial Sequence
  source: /note="Description of Artificial Sequence: Synthetic oligonucleotide"
  source: /note="SR34"
cgcacactggcgtcggctctggcaggatgtttcgtaattagatagc

SEQ ID NO: 124 - protein, 453 aa, Artificial Sequence
  source: /note="Description of Artificial Sequence: Synthetic polypeptide"
  source: /note="Bevacizumab (Avastin) anti-VEGF, Heavy Chain"
EVQLVESGGGLVQPGGSLRLSCAASGYTFTNYGMNWVRQAPGKGLEWVGWINTYTGEPTYAADFKRRFTFSLDTSKSTAYLQMNSLRAEDTAVYYCAKYPHYYGSSHWYFDVWGQGTLVTVSSASTKGPSVFPLAPSSKSTSGGTAALGCLVKDYFPEPVTVSWNSGALTSGVHTFPAVLQSSGLYSLSSVVTVPSSSLGTQTYICNVNHKPSNTKVDKKVEPKSCDKTHTCPPCPAPELLGGPSVFLFPPKPKDTLMISRTPEVTCVVVDVSHEDPEVKFNWYVDGVEVHNAKTKPREEQYNSTYRVVSVLTVLHQDWLNGKEYKCKVSNKALPAPIEKTISKAKGQPREPQVYTLPPSREEMTKNQVSLTCLVKGFYPSDIAVEWESNGQPENNYKTTPPVLDSDGSFFLYSKLTVDKSRWQQGNVFSCSVMHEALHNHYTQKSLSLSPGK

SEQ ID NO: 125 - protein, 214 aa, Artificial Sequence
  source: /note="Description of Artificial Sequence: Synthetic polypeptide"
  source: /note="Bevacizumab (Avastin) anti-VEGF, Light Chain"
DIQMTQSPSSLSASVGDRVTITCSASQDISNYLNWYQQKPGKAPKVLIYFTSSLHSGVPSRFSGSGSGTDFTLTISSLQPEDFATYYCQQYSTVPWTFGQGTKVEIKRTVAAPSVFIFPPSDEQLKSGTASVVCLLNNFYPREAKVQWKVDNALQSGNSQESVTEQDSKDSTYSLSSTLTLSKADYEKHKVYACEVTHQGLSSPVTKSFNRGEC

SEQ ID NO: 126 - protein, 9 aa, Artificial Sequence
  source: /note="Description of Artificial Sequence: Synthetic peptide"
  source: /note="D-peptide A"
RLYLRIGRR

SEQ ID NO: 127 - protein, 9 aa, Artificial Sequence
  source: /note="Description of Artificial Sequence: Synthetic peptide"
  source: /note="D-peptide B"
RLRLRIGRR

SEQ ID NO: 128 - protein, 9 aa, Artificial Sequence
  source: /note="Description of Artificial Sequence: Synthetic peptide"
  source: /note="D-peptide C"
ALYLAIRRR

SEQ ID NO: 129 - protein, 9 aa, Artificial Sequence
  source: /note="Description of Artificial Sequence: Synthetic peptide"
  source: /note="D-peptide D"
RLLLRIGRR

SEQ ID NO: 130 - protein, 15 aa, Artificial Sequence
  source: /note="Description of Artificial Sequence: Synthetic peptide"
  source: /note="D-K6L9"
LKLLKKLLKKLLKLL

SEQ ID NO: 131 - protein, 26 aa, Artificial Sequence
  source: /note="Description of Artificial Sequence: Synthetic peptide"
  source: /note="NRC-03"
GRRKRKWLRRIGKGVKIIGGAALDHL

SEQ ID NO: 132 - protein, 25 aa, Artificial Sequence
  source: /note="Description of Artificial Sequence: Synthetic peptide"
  source: /note="NRC-07"
RWGKWFKKATHVGKHVGKAALTAYL

SEQ ID NO: 133 - protein, 18 aa, Artificial Sequence
  source: /note="Description of Artificial Sequence: Synthetic peptide"
  source: /note="Gomesin"
ZCRRLCYKQRCVTYCRGR

SEQ ID NO: 134 - protein, 20 aa, Artificial Sequence
  source: /note="Description of Artificial Sequence: Synthetic peptide"
  source: /note="Hepcidin TH2-3"
QSHLSLCRWCCNCCRSNKGC

SEQ ID NO: 135 - protein, 33 aa, Artificial Sequence
  source: /note="Description of Artificial Sequence: Synthetic polypeptide"
  source: /note="Dermaseptin B2"
GLWSKIKEVGKEAAKAAAKAAGKAALGAVSEAV

SEQ ID NO: 136 - protein, 13 aa, Artificial Sequence
  source: /note="Description of Artificial Sequence: Synthetic peptide"
  source: /note="PTP7"
FLGALFKALSKLL

SEQ ID NO: 137 - protein, 42 aa, Artificial Sequence
  source: /note="Description of Artificial Sequence: Synthetic polypeptide"
  source: /note="MGA2"
GIGKFLHSAKKFGKAFVGEIMNSGGKKWKMRRNQFWVKVQRG

SEQ ID NO: 138 - protein, 30 aa, Artificial Sequence
  source: /note="Description of Artificial Sequence: Synthetic polypeptide"
  source: /note="HNP-1"
ACYCRIPACIAGERRYGTCIYQGRLWAFCC

SEQ ID NO: 139 - protein, 17 aa, Artificial Sequence
  source: /note="Description of Artificial Sequence: Synthetic peptide"
  source: /note="Tachyplesin"
KWCFRVCYRGICYRRCR

SEQ ID NO: 140 - protein, 15 aa, Artificial Sequence
  source: /note="Description of Artificial Sequence: Synthetic peptide"
  source: /note="Temporin-1CEa"
FVDLKKIANIINSIF

SEQ ID NO: 141 - protein, 27 aa, Artificial Sequence
  source: /note="Description of Artificial Sequence: Synthetic peptide"
  source: /note="NK-2"
KILRGVCKKIMRTFLRRISKDILTGKK

SEQ ID NO: 142 - protein, 6 aa, Artificial Sequence
  source: /note="Description of Artificial Sequence: Synthetic peptide"
  source: /note="Bovine lactoferricin B6 (Lbcin B6)"
RRWQWR

SEQ ID NO: 143 - protein, 34 aa, Artificial Sequence
  source: /note="Description of Artificial Sequence: Synthetic polypeptide"
  source: /note="Cecropin CB1"
KWKVFKKIEKMGRNIRNGIVKAGPKWKVFKKIEK

SEQ ID NO: 144 - protein, 26 aa, Artificial Sequence
  source: /note="Description of Artificial Sequence: Synthetic peptide"
  source: /note="Melittin"
GIGAVLKVLTTGLPALISWIKRKRQQ

SEQ ID NO: 145 - protein, 17 aa, Artificial Sequence
  source: /note="Description of Artificial Sequence: Synthetic peptide"
  source: /note="Tachyplesin"
KWCFRVCYRGICYRRCR

SEQ ID NO: 146 - protein, 37 aa, Artificial Sequence; identical to SEQ ID NO: 105
  source: /note="Description of Artificial Sequence: Synthetic polypeptide"
  source: /note="LL-37"

SEQ ID NO: 147 - protein, 35 aa, Artificial Sequence; identical to SEQ ID NO: 106
  source: /note="Description of Artificial Sequence: Synthetic polypeptide"
  source: /note="Cecropin B"

SEQ ID NO: 148 - protein, 23 aa, Artificial Sequence
  source: /note="Description of Artificial Sequence: Synthetic peptide"
  source: /note="Magainin 2"
GIGKFLHSAKKFGKAFVGEIMNS

SEQ ID NO: 149 - protein, 21 aa, Artificial Sequence
  source: /note="Description of Artificial Sequence: Synthetic peptide"
  source: /note="Buforin IIb"
RAGLQFPVGRLLRRLLRRLLR

SEQ ID NO: 150 - protein, 13 aa, Artificial Sequence
  source: /note="Description of Artificial Sequence: Synthetic peptide"
  source: /note="Alloferon-1"
HGVSGHGQHGVHG

SEQ ID NO: 151 - protein, 12 aa, Artificial Sequence
  source: /note="Description of Artificial Sequence: Synthetic peptide"
  source: /note="Alloferon-2"
GVSGHGQHGVHG

SEQ ID NO: 152 - protein, 253 aa, Artificial Sequence
  source: /note="Description of Artificial Sequence: Synthetic polypeptide"
  source: /note="interleukin-12 subunit alpha precursor (homo sapiens)"
MWPPGSASQPPPSPAAATGLHPAARPVSLQCRLSMCPARSLLLVATLVLLDHLSLARNLPVATPDPGMFPCLHHSQNLLRAVSNMLQKARQTLEFYPCTSEEIDHEDITKDKTSTVEACLPLELTKNESCLNSRETSFITNGSCLASRKTSFMMALCLSSIYEDLKMYQVEFKTMNAKLLMDPKRQIFLDQNMLAVIDELMQALNFNSETVPQKSSLEEPDFYKTKIKLCILLHAFRIRAVTIDRVMSYLNAS

SEQ ID NO: 153 - protein, 328 aa, Artificial Sequence
  source: /note="Description of Artificial Sequence: Synthetic polypeptide"
  source: /note="interleukin-12 subunit beta precursor (homo sapiens)"
MCHQQLVISWFSLVFLASPLVAIWELKKDVYVVELDWYPDAPGEMVVLTCDTPEEDGITWTLDQSSEVLGSGKTLTIQVKEFGDAGQYTCHKGGEVLSHSLLLLHKKEDGIWSTDILKDQKEPKNKTFLRCEAKNYSGRFTCWWLTTISTDLTFSVKSSRGSSDPQGVTCGAATLSAERVRGDNKEYEYSVECQEDSACPAAEESLPIEVMVDAVHKLKYENYTSSFFIRDIIKPDPPKNLQLKPLKNSRQVEVSWEYPDTWSTPHSYFSLTFCVQVQGKSKREKKDRVFTDKTSATVICRKNASISVRAQDRYYSSSWSEWASVPCS

SEQ ID NO: 154 - protein, 162 aa, Artificial Sequence
  source: /note="Description of Artificial Sequence: Synthetic polypeptide"
  source: /note="interleukin-15 isoform1 preproprotein (homo sapiens)"
MRISKPHLRSISIQCYLCLLLNSHFLTEAGIHVFILGCFSAGLPKTEANWVNVISDLKKIEDLIQSMHIDATLYTESDVHPSCKVTAMKCFLLELQVISLESGDASIHDTVENLIILANNSLSSNGNVTESGCKECEELEEKNIKEFLQSFVHIVQMFINTS

SEQ ID NO: 155 - protein, 135 aa, Artificial Sequence
  source: /note="Description of Artificial Sequence: Synthetic polypeptide"
  source: /note="interleukin-15 isoform 2 preproprotein (homo sapiens)"
MVLGTIDLCSCFSAGLPKTEANWVNVISDLKKIEDLIQSMHIDATLYTESDVHPSCKVTAMKCFLLELQVISLESGDASIHDTVENLIILANNSLSSNGNVTESGCKECEELEEKNIKEFLQSFVHIVQMFINTS

SEQ ID NO: 156 - protein, 153 aa, Artificial Sequence
  source: /note="Description of Artificial Sequence: Synthetic polypeptide"
  source: /note="interleukin-2 precursor (homo sapiens)"
MYRMQLLSCIALSLALVTNSAPTSSSTKKTQLQLEHLLLDLQMILNGINNYKNPKLTRMLTFKFYMPKKATELKHLQCLEEELKPLEEVLNLAQSKNFHLRPRDLISNINVIVLELKGSETTFMCEYADETATIVEFLNRWITFCQSIISTLT

SEQ ID NO: 157 - protein, 162 aa, Artificial Sequence
  source: /note="Description of Artificial Sequence: Synthetic polypeptide"
  source: /note="interleukin-21 isoform 1 precursor (homo sapiens)"
MRSSPGNMERIVICLMVIFLGTLVHKSSSQGQDRHMIRMRQLIDIVDQLKNYVNDLVPEFLPAPEDVETNCEWSAFSCFQKAQLKSANTGNNERIINVSIKKLKRKPPSTNAGRRQKHRLTCPSCDSYEKKPPKEFLERFKSLLQKMIHQHLSSRTHGSEDS

SEQ ID NO: 158 - protein, 153 aa, Artificial Sequence
  source: /note="Description of Artificial Sequence: Synthetic polypeptide"
  source: /note="interleukin-21 isoform 2 precursor (homo sapiens)"
MRSSPGNMERIVICLMVIFLGTLVHKSSSQGQDRHMIRMRQLIDIVDQLKNYVNDLVPEFLPAPEDVETNCEWSAFSCFQKAQLKSANTGNNERIINVSIKKLKRKPPSTNAGRRQKHRLTCPSCDSYEKKPPKEFLERFKSLLQKVSTLSFI

SEQ ID NO: 159 - protein, 144 aa, Artificial Sequence
  source: /note="Description of Artificial Sequence: Synthetic polypeptide"
  source: /note="granulocyte-macrophage colony-stimulating factor precursor (homo sapiens)"
MWLQSLLLLGTVACSISAPARSPSPSTQPWEHVNAIQEARRLLNLSRDTAAEMNETVEVISEMFDLQEPTCLQTRLELYKQGLRGSLTKLKGPLTMMASHYKQHCPPTPETSCATQIITFESFKENLKDFLLVIPFDCWEPVQE

SEQ ID NO: 160 - protein, 10 aa, Artificial Sequence
  source: /note="Description of Artificial Sequence: Synthetic peptide"
  source: /note="alpha-actinin-4"
FIASNGVKLV

SEQ ID NO: 161 - protein, 16 aa, Artificial Sequence
  source: /note="Description of Artificial Sequence: Synthetic peptide"
  source: /note="ARTC1"
YSVYFNLPADTIYTNH

SEQ ID NO: 162 - protein, 9 aa, Artificial Sequence
  source: /note="Description of Artificial Sequence: Synthetic peptide"
  source: /note="BCR-ABL fusion protein (b3a2)"
SSKALQRPV

SEQ ID NO: 163 - protein, 9 aa, Artificial Sequence
  source: /note="Description of Artificial Sequence: Synthetic peptide"
  source: /note="BCR-ABL fusion protein (b3a2)"
GFKQSSKAL

SEQ ID NO: 164 - protein, 17 aa, Artificial Sequence
  source: /note="Description of Artificial Sequence: Synthetic peptide"
  source: /note="BCR-ABL fusion protein (b3a2)"
ATGFKQSSKALQRPVAS

SEQ ID NO: 165 - protein, 29 aa, Artificial Sequence
  source: /note="Description of Artificial Sequence: Synthetic peptide"
  source: /note="B-RAF"
EDLTVKIGDFGLATEKSRWSGSHQFEQLS

SEQ ID NO: 166 - protein, 10 aa, Artificial Sequence
  source: /note="Description of Artificial Sequence: Synthetic peptide"
  source: /note="CASP-5"
FLIIWQNTMG

SEQ ID NO: 167 - protein, 9 aa, Artificial Sequence
  source: /note="Description of Artificial Sequence: Synthetic peptide"
  source: /note="CASP-8"
FPSDSWCYF

SEQ ID NO: 168 - protein, 9 aa, Artificial Sequence
  source: /note="Description of Artificial Sequence: Synthetic peptide"
  source: /note="beta-catenin"
SYLDSGIHF

SEQ ID NO: 169 - protein, 13 aa, Artificial Sequence
  source: /note="Description of Artificial Sequence: Synthetic peptide"
  source: /note="Cdc27"
FSWAMDLDPKGAE

SEQ ID NO: 170 - protein, 10 aa, Artificial Sequence
  source: /note="Description of Artificial Sequence: Synthetic peptide"
  source: /note="CDK4"
ACDPHSGHFV

SEQ ID NO: 171 - protein, 9 aa, Artificial Sequence
  source: /note="Description of Artificial Sequence: Synthetic peptide"
  source: /note="CDK12"
CILGKLFTK

SEQ ID NO: 172 - protein, 10 aa, Artificial Sequence
  source: /note="Description of Artificial Sequence: Synthetic peptide"
  source: /note="CDKN2A"
AVCPWTWLRG

SEQ ID NO: 173 - protein, 9 aa, Artificial Sequence
  source: /note="Description of Artificial Sequence: Synthetic peptide"
  source: /note="CLPP"
ILDKVLVHL

SEQ ID NO: 174 - protein, 15 aa, Artificial Sequence
  source: /note="Description of Artificial Sequence: Synthetic peptide"
  source: /note="COA-1"
TLYQDDTLTLQAAGE

SEQ ID NO: 175 - protein, 9 aa, Artificial Sequence
  source: /note="Description of Artificial Sequence: Synthetic peptide"
  source: /note="CSNK1A1"
GLFGDIYLA

SEQ ID NO: 176 - protein, 16 aa, Artificial Sequence
  source: /note="Description of Artificial Sequence: Synthetic peptide"
  source: /note="dek-can fusion protein"
TMKQICKKEIRRLHQY

SEQ ID NO: 177 - protein, 10 aa, Artificial Sequence
  source: /note="Description of Artificial Sequence: Synthetic peptide"
  source: /note="EFTUD2"
KILDAVVAQK

SEQ ID NO: 178 - protein, 9 aa, Artificial Sequence
  source: /note="Description of Artificial Sequence: Synthetic peptide"
  source: /note="Elongation factor 2"
ETVSEQSNV

SEQ ID NO: 179 - protein, 10 aa, Artificial Sequence
  source: /note="Description of Artificial Sequence: Synthetic peptide"
  source: /note="ETV6-AML1 fusion protein"
RIAECILGMI

SEQ ID NO: 180 - protein, 15 aa, Artificial Sequence
  source: /note="Description of Artificial Sequence: Synthetic peptide"
  source: /note="ETV6-AML1 fusion protein"
IGRIAECILGMNPSR

SEQ ID NO: 181 - protein, 10 aa, Artificial Sequence
  source: /note="Description of Artificial Sequence: Synthetic peptide"
  source: /note="FLT3-ITD"
YVDFREYEYY

SEQ ID NO: 182 - protein, 9 aa, Artificial Sequence
  source: /note="Description of Artificial Sequence: Synthetic peptide"
  source: /note="FNDC3B"
VVMSWAPPV

SEQ ID NO: 183 - protein, 14 aa, Artificial Sequence
  source: /note="Description of Artificial Sequence: Synthetic peptide"
  source: /note="FN1"
MIFEKHGFRRTTPP

SEQ ID NO: 184 - protein, 10 aa, Artificial Sequence
  source: /note="Description of Artificial Sequence: Synthetic peptide"
  source: /note="GAS7"
SLADEAEVYL

SEQ ID NO: 185 - protein, 10 aa, Artificial Sequence
  source: /note="Description of Artificial Sequence: Synthetic peptide"
  source: /note="GPNMB"
TLDWLLQTPK

SEQ ID NO: 186 - protein, 9 aa, Artificial Sequence
  source: /note="Description of Artificial Sequence: Synthetic peptide"
  source: /note="HAUS3"
ILNAMIAKI

SEQ ID NO: 187 - protein, 8 aa, Artificial Sequence
  source: /note="Description of Artificial Sequence: Synthetic peptide"
  source: /note="HSDL1"
CYMEAVAL

SEQ ID NO: 188 - protein, 9 aa, Artificial Sequence
  source: /note="Description of Artificial Sequence: Synthetic peptide"
  source: /note="LDLR-fucosyltransferaseAS"
WRRAPAPGA

SEQ ID NO: 189 - protein, 9 aa, Artificial Sequence
  source: /note="Description of Artificial Sequence: Synthetic peptide"
  source: /note="fusion protein"
PVTWRRAPA

SEQ ID NO: 190-191 - skipped (2 entries)

SEQ ID NO: 192 - protein, 10 aa, Artificial Sequence
  source: /note="Description of Artificial Sequence: Synthetic peptide"
  source: /note="hsp70-2"
SLFEGIDIYT

SEQ ID NO: 193 - protein, 9 aa, Artificial Sequence
  source: /note="Description of Artificial Sequence: Synthetic peptide"
  source: /note="hsp70-2"
AEPINIQTW

SEQ ID NO: 194 - protein, 11 aa, Artificial Sequence
  source: /note="Description of Artificial Sequence: Synthetic peptide"
  source: /note="MART2"
FLEGNEVGKTY

SEQ ID NO: 195 - protein, 9 aa, Artificial Sequence
  source: /note="Description of Artificial Sequence: Synthetic peptide"
  source: /note="MATN"
KTLTSVFQK

SEQ ID NO: 196 - protein, 9 aa, Artificial Sequence
  source: /note="Description of Artificial Sequence: Synthetic peptide"
  source: /note="ME1"
FLDEFMEGV

SEQ ID NO: 197 - protein, 9 aa, Artificial Sequence
  source: /note="Description of Artificial Sequence: Synthetic peptide"
  source: /note="MUM-1f"
EEKLIVVLF

SEQ ID NO: 198 - protein, 11 aa, Artificial Sequence
  source: /note="Description of Artificial Sequence: Synthetic peptide"
  source: /note="MUM-2"
SELFRSGLDSY

SEQ ID NO: 199 - protein, 9 aa, Artificial Sequence
  source: /note="Description of Artificial Sequence: Synthetic peptide"
  source: /note="MUM-2"
FRSGLDSYV

SEQ ID NO: 200 - protein, 9 aa, Artificial Sequence
  source: /note="Description of Artificial Sequence: Synthetic peptide"
  source: /note="MUM-3"
EAFIQPITR

SEQ ID NO: 201 - protein, 12 aa, Artificial Sequence
  source: /note="Description of Artificial Sequence: Synthetic peptide"
  source: /note="neo-PAP"
RVIKNSIRLTLE

SEQ ID NO: 202 - protein, 9 aa, Artificial Sequence
  source: /note="Description of Artificial Sequence: Synthetic peptide"
  source: /note="Myosin class I"
KINKNPKYK

SEQ ID NO: 203 - protein, 8 aa, Artificial Sequence
  source: /note="Description of Artificial Sequence: Synthetic peptide"
  source: /note="NFYC"
QQITKTEV

SEQ ID NO: 204 - protein, 11 aa, Artificial Sequence
  source: /note="Description of Artificial Sequence: Synthetic peptide"
  source: /note="OGT"
SLYKFSPFPLG

SEQ ID NO: 205 - protein, 9 aa, Artificial Sequence
  source: /note="Description of Artificial Sequence: Synthetic peptide"
  source: /note="OS-9"
KELEGILLL

SEQ ID NO: 206 - protein, 9 aa, Artificial Sequence
  source: /note="Description of Artificial Sequence: Synthetic peptide"
  source: /note="p53"
VVPCEPPEV

SEQ ID NO: 207 - protein, 25 aa, Artificial Sequence
  source: /note="Description of Artificial Sequence: Synthetic peptide"
  source: /note="pml-RARalpha fusion protein"
NSNHVASGAGEAAIETQSSSSEEIV

SEQ ID NO: 208 - protein, 9 aa, Artificial Sequence
  source: /note="Description of Artificial Sequence: Synthetic peptide"
  source: /note="PPP1R3B"
YTDFHCQYV

SEQ ID NO: 209 - protein, 10 aa, Artificial Sequence
  source: /note="Description of Artificial Sequence: Synthetic peptide"
  source: /note="PRDX5"
LLLDDLLVSI

SEQ ID NO: 210 - protein, 16 aa, Artificial Sequence
  source: /note="Description of Artificial Sequence: Synthetic peptide"
  source: /note="PTPRK"
PYYFAAELPPRNLPEP

SEQ ID NO: 211 - protein, 9 aa, Artificial Sequence
  source: /note="Description of Artificial Sequence: Synthetic peptide"
  source: /note="K-ras"
VVVGAVGVG

SEQ ID NO: 212 - protein, 10 aa, Artificial Sequence
  source: /note="Description of Artificial Sequence: Synthetic peptide"
  source: /note="N-ras"
ILDTAGREEY

SEQ ID NO: 213 - protein, 9 aa, Artificial Sequence
  source: /note="Description of Artificial Sequence: Synthetic peptide"
  source: /note="RBAF600"
RPHVPESAF

SEQ ID NO: 214 - protein, 9 aa, Artificial Sequence
  source: /note="Description of Artificial Sequence: Synthetic peptide"
  source: /note="SIRT2"
KIFSEVTLK

SEQ ID NO: 215 - protein, 9 aa, Artificial Sequence
  source: /note="Description of Artificial Sequence: Synthetic peptide"
  source: /note="SNRPD1"
SHETVIIEL

SEQ ID NO: 216 - protein, 10 aa, Artificial Sequence
  source: /note="Description of Artificial Sequence: Synthetic peptide"
  source: /note="SYT-SSX1 or -SSX2 fusion protein"
QRPYGYDQIM

SEQ ID NO: 217 - protein, 10 aa, Artificial Sequence
  source: /note="Description of Artificial Sequence: Synthetic peptide"
  source: /note="TGF-betaRII"
RLSSCVPVAG

SEQ ID NO: 218 - protein, 15 aa, Artificial Sequence
  source: /note="Description of Artificial Sequence: Synthetic peptide"
  source: /note="Triosephosphate isomerase"
GELIGILNAAKVPAD

SEQ ID NO: 219 - protein, 9 aa, Artificial Sequence
  source: /note="Description of Artificial Sequence: Synthetic peptide"
  source: /note="Cyclin-A1"
FLDRFLSCM

SEQ ID NO: 220 - protein, 11 aa, Artificial Sequence
  source: /note="Description of Artificial Sequence: Synthetic peptide"
  source: /note="Cyclin-A1"
SLIAAAAFCLA

SEQ ID NO: 221 - protein, 8 aa, Artificial Sequence
  source: /note="Description of Artificial Sequence: Synthetic peptide"
  source: /note="GAGE-1,2,8"
YRPRPRRY

SEQ ID NO: 222 - protein, 9 aa, Artificial Sequence
  source: /note="Description of Artificial Sequence: Synthetic peptide"
  source: /note="GAGE-3,4,5,6,7"
YYWPRPRRY

SEQ ID NO: 223 - protein, 10 aa, Artificial Sequence
  source: /note="Description of Artificial Sequence: Synthetic peptide"
  source: /note="GnTVf"
  VARIANT (10)..(10): /replace=" "
  MISC_FEATURE (1)..(10): /note="Variant residues given in the sequence have no preference with respect to those in the annotations for variant positions"
VLPDVFIRCV

SEQ ID NO: 224 - protein, 9 aa, Artificial Sequence
  source: /note="Description of Artificial Sequence: Synthetic peptide"
  source: /note="HERV-K-MEL"
MLAVISCAV

SEQ ID NO: 225 - protein, 9 aa, Artificial Sequence
  source: /note="Description of Artificial Sequence: Synthetic peptide"
  source: /note="KK-LC-1"
RQKRILVNL

SEQ ID NO: 226 - protein, 9 aa, Artificial Sequence
  source: /note="Description of Artificial Sequence: Synthetic peptide"
  source: /note="KM-HN-1"
NYNNFYRFL

SEQ ID NO: 227 - protein, 10 aa, Artificial Sequence
  source: /note="Description of Artificial Sequence: Synthetic peptide"
  source: /note="KM-HN-1"
EYSKECLKEF

SEQ ID NO: 228 - protein, 9 aa, Artificial Sequence
  source: /note="Description of Artificial Sequence: Synthetic peptide"
  source: /note="KM-HN-1"
EYLSLSDKI

SEQ ID NO: 229 - protein, 11 aa, Artificial Sequence
  source: /note="Description of Artificial Sequence: Synthetic peptide"
  source: /note="LAGE-1"
MLMAQEALAFL

SEQ ID NO: 230 - protein, 9 aa, Artificial Sequence
  source: /note="Description of Artificial Sequence: Synthetic peptide"
  source: /note="LAGE-1"
SLLMWITQC

SEQ ID NO: 231 - protein, 10 aa, Artificial Sequence
  source: /note="Description of Artificial Sequence: Synthetic peptide"
  source: /note="LAGE-1"
LAAQERRVPR

SEQ ID NO: 232 - protein, 9 aa, Artificial Sequence
  source: /note="Description of Artificial Sequence: Synthetic peptide"
  source: /note="LAGE-1"
ELVRRILSR

SEQ ID NO: 233 - protein, 9 aa, Artificial Sequence
  source: /note="Description of Artificial Sequence: Synthetic peptide"
  source: /note="LAGE-1"
APRGVRMAV

SEQ ID NO: 234 - protein, 14 aa, Artificial Sequence
  source: /note="Description of Artificial Sequence: Synthetic peptide"
  source: /note="LAGE-1"
SLLMWITQCFLPVF

SEQ ID NO: 235 - protein, 20 aa, Artificial Sequence
  source: /note="Description of Artificial Sequence: Synthetic peptide"
  source: /note="LAGE-1"
QGAMLAAQERRVPRAAEVPR

SEQ ID NO: 236 - protein, 18 aa, Artificial Sequence
  source: /note="Description of Artificial Sequence: Synthetic peptide"
  source: /note="LAGE-1"
AADHRQLQLSISSCLQQL

SEQ ID NO: 237 - protein, 22 aa, Artificial Sequence
  source: /note="Description of Artificial Sequence: Synthetic peptide"
  source: /note="LAGE-1"
CLSRRPWKRSWSAGSCPGMPHL

SEQ ID NO: 238 - protein, 13 aa, Artificial Sequence
  source: /note="Description of Artificial Sequence: Synthetic peptide"
  source: /note="LAGE-1"
ILSRDAAPLPRPG

SEQ ID NO: 239 - protein, 14 aa, Artificial Sequence
  source: /note="Description of Artificial Sequence: Synthetic peptide"
  source: /note="LAGE-1"
AGATGGRGPRGAGA

SEQ ID NO: 240 - protein, 10 aa, Artificial Sequence
  source: /note="Description of Artificial Sequence: Synthetic peptide"
  source: /note="LY6K"
RYCNLEGPPI

SEQ ID NO: 241 - protein, 24 aa, Artificial Sequence
  source: /note="Description of Artificial Sequence: Synthetic peptide"
  source: /note="LY6K"
KWTEPYCVIAAVKIFPRFFMVAKQ

SEQ ID NO: 242 - protein, 20 aa, Artificial Sequence
  source: /note="Description of Artificial Sequence: Synthetic peptide"
  source: /note="LY6K"
KCCKIRYCNLEGPPINSSVF

SEQ ID NO: 243 - protein, 9 aa, Artificial Sequence
  source: /note="Description of Artificial Sequence: Synthetic peptide"
  source: /note="MAGE-A1"
EADPTGHSY

SEQ ID NO: 244 - protein, 9 aa, Artificial Sequence
  source: /note="Description of Artificial Sequence: Synthetic peptide"
  source: /note="MAGE-A1"
SLFRAVITK

SEQ ID NO: 245 - protein, 10 aa, Artificial Sequence
  source: /note="Description of Artificial Sequence: Synthetic peptide"
  source: /note="MAGE-A1"
EVYDGREHSA

SEQ ID NO: 246 - protein, 9 aa, Artificial Sequence
  source: /note="Description of Artificial Sequence: Synthetic peptide"
  source: /note="MAGE-A1"
RVRFFFPSL

SEQ ID NO: 247 - protein, 9 aa, Artificial Sequence
  source: /note="Description of Artificial Sequence: Synthetic peptide"
  source: /note="MAGE-A1"
EADPTGHSY

SEQ ID NO: 248 - protein, 10 aa, Artificial Sequence
  source: /note="Description of Artificial Sequence: Synthetic peptide"
  source: /note="MAGE-A1"
REPVTKAEML

SEQ ID NO: 249 - protein, 10 aa, Artificial Sequence
  source: /note="Description of Artificial Sequence: Synthetic peptide"
  source: /note="MAGE-A1"
KEADPTGHSY

SEQ ID NO: 250 - protein, 9 aa, Artificial Sequence
  source: /note="Description of Artificial Sequence: Synthetic peptide"
  source: /note="MAGE-A1"
DPARYEFLW

SEQ ID NO: 251 - protein, 11 aa, Artificial Sequence
  source: /note="Description of Artificial Sequence: Synthetic peptide"
  source: /note="MAGE-A1"
ITKKVADLVGF

SEQ ID NO: 252 - protein, 9 aa, Artificial Sequence
  source: /note="Description of Artificial Sequence: Synthetic peptide"
  source: /note="MAGE-A1"
SAFPTTINF

SEQ ID NO: 253 - protein, 9 aa, Artificial Sequence
  source: /note="Description of Artificial Sequence: Synthetic peptide"
  source: /note="MAGE-A1"
SAYGEPRKL

SEQ ID NO: 254 - protein, 9 aa, Artificial Sequence
  source: /note="Description of Artificial Sequence: Synthetic peptide"
  source: /note="MAGE-A1"
RVRFFFPSL

SEQ ID NO: 255 - protein, 9 aa, Artificial Sequence
  source: /note="Description of Artificial Sequence: Synthetic peptide"
  source: /note="MAGE-A1"
SAYGEPRKL

SEQ ID NO: 256 - protein, 15 aa, Artificial Sequence
  source: /note="Description of Artificial Sequence: Synthetic peptide"
  source: /note="MAGE-A1"
TSCILESLFRAVITK

SEQ ID NO: 257 - protein, 15 aa, Artificial Sequence
  source: /note="Description of Artificial Sequence: Synthetic peptide"
  source: /note="MAGE-A1"
PRALAETSYVKVLEY

SEQ ID NO: 258 - protein, 16 aa, Artificial Sequence
  source: /note="Description of Artificial Sequence: Synthetic peptide"
  source: /note="MAGE-A1"
FLLLKYRAREPVTKAE

SEQ ID NO: 259 - protein, 12 aa, Artificial Sequence
  source: /note="Description of Artificial Sequence: Synthetic peptide"
  source: /note="MAGE-A1"
EYVIKVSARVRF

SEQ ID NO: 260 - protein, 10 aa, Artificial Sequence
  source: /note="Description of Artificial Sequence: Synthetic peptide"
  source: /note="MAGE-A2"
YLQLVFGIEV

SEQ ID NO: 261 - protein, 9 aa, Artificial Sequence
  source: /note="Description of Artificial Sequence: Synthetic peptide"
  source: /note="MAGE-A2"
EYLQLVFGI

SEQ ID NO: 262 - protein, 10 aa, Artificial Sequence
  source: /note="Description of Artificial Sequence: Synthetic peptide"
  source: /note="MAGE-A2"
REPVTKAEML

SEQ ID NO: 263 - protein, 9 aa, Artificial Sequence
  source: /note="Description of Artificial Sequence: Synthetic peptide"
  source: /note="MAGE-A2"
EGDCAPEEK

SEQ ID NO: 264 - protein, 14 aa, Artificial Sequence
  source: /note="Description of Artificial Sequence: Synthetic peptide"
  source: /note="MAGE-A2"
LLKYRAREPVTKAE

SEQ ID NO: 265 - protein, 9 aa, Artificial Sequence
  source: /note="Description of Artificial Sequence: Synthetic peptide"
  source: /note="MAGE-A3"
EVDPIGHLY

SEQ ID NO: 266 - protein, 10 aa, Artificial Sequence
  source: /note="Description of Artificial Sequence: Synthetic peptide"
  source: /note="MAGE-A3"
FLWGPRALVD

SEQ ID NO: 267 - protein, 9 aa, Artificial Sequence
  source: /note="Description of Artificial Sequence: Synthetic peptide"
  source: /note="MAGE-A3"
KVAELVHFL

SEQ ID NO: 268 - protein, 9 aa, Artificial Sequence
  source: /note="Description of Artificial Sequence: Synthetic peptide"
  source: /note="MAGE-A3"
TFPDLESEF

SEQ ID NO: 269 - protein, 9 aa, Artificial Sequence
  source: /note="Description of Artificial Sequence: Synthetic peptide"
  source: /note="MAGE-A3"
VAELVHFLL

SEQ ID NO: 270 - protein, 10 aa, Artificial Sequence
  source: /note="Description of Artificial Sequence: Synthetic peptide"
  source: /note="MAGE-A3"
MEVDPIGHLY

SEQ ID NO: 271 - protein, 9 aa, Artificial Sequence
  source: /note="Description of Artificial Sequence: Synthetic peptide"
  source: /note="MAGE-A3"
EVDPIGHLY

SEQ ID NO: 272 - protein, 10 aa, Artificial Sequence
  source: /note="Description of Artificial Sequence: Synthetic peptide"
  source: /note="MAGE-A3"
REPVTKAEML

SEQ ID NO: 273 - protein, 10 aa, Artificial Sequence
  source: /note="Description of Artificial Sequence: Synthetic peptide"
  source: /note="MAGE-A3"
AELVHFLLLI

SEQ ID NO: 274 - protein, 10 aa, Artificial Sequence
  source: /note="Description of Artificial Sequence: Synthetic peptide"
  source: /note="MAGE-A3"
MEVDPIGHLY

SEQ ID NO: 275 - protein, 9 aa, Artificial Sequence
  source: /note="Description of Artificial Sequence: Synthetic peptide"
  source: /note="MAGE-A3"
WQYFFPVIF

SEQ ID NO: 276 - protein, 9 aa, Artificial Sequence
  source: /note="Description of Artificial Sequence: Synthetic peptide"
  source: /note="MAGE-A3"
EGDCAPEEK

SEQ ID NO: 277 - protein, 16 aa, Artificial Sequence
  source: /note="Description of Artificial Sequence: Synthetic peptide"
  source: /note="MAGE-A3"
KKLLTQHFVQENYLEY

SEQ ID NO: 278 - protein, 15 aa, Artificial Sequence
  source: /note="Description of Artificial Sequence: Synthetic peptide"
  source: /note="MAGE-A3"
RKVAELVHFLLLKYR

SEQ ID NO: 279 - protein, 16 aa, Artificial Sequence
  source: /note="Description of Artificial Sequence: Synthetic peptide"
  source: /note="MAGE-A3"
KKLLTQHFVQENYLEY

SEQ ID NO: 280 - protein, 16 aa, Artificial Sequence
  source: /note="Description of Artificial Sequence: Synthetic peptide"
  source: /note="MAGE-A3"
ACYEFLWGPRALVETS

SEQ ID NO: 281 - protein, 15 aa, Artificial Sequence
  source: /note="Description of Artificial Sequence: Synthetic peptide"
  source: /note="MAGE-A3"
RKVAELVHFLLLKYR

SEQ ID NO: 282 - protein, 12 aa, Artificial Sequence
  source: /note="Description of Artificial Sequence: Synthetic peptide"
  source: /note="MAGE-A3"
VIFSKASSSLQL

SEQ ID NO: 283 - protein, 15 aa, Artificial Sequence
  source: /note="Description of Artificial Sequence: Synthetic peptide"
  source: /note="MAGE-A3"
VFGIELMEVDPIGHL

SEQ ID NO: 284 - protein, 15 aa, Artificial Sequence
  source: /note="Description of Artificial Sequence: Synthetic peptide"
  source: /note="MAGE-A3"
GDNQIMPKAGLLIIV

SEQ ID NO: 285 - protein, 15 aa, Artificial Sequence
  source: /note="Description of Artificial Sequence: Synthetic peptide"
  source: /note="MAGE-A3"
TSYVKVLHHMVKISG

SEQ ID NO: 286 - protein, 16 aa, Artificial Sequence
  source: /note="Description of Artificial Sequence: Synthetic peptide"
  source: /note="MAGE-A3"
RKVAELVHFLLLKYRA

SEQ ID NO: 287 - protein, 16 aa, Artificial Sequence
  source: /note="Description of Artificial Sequence: Synthetic peptide"
  source: /note="MAGE-A3"
FLLLKYRAREPVTKAE

SEQ ID NO: 288 - protein, 9 aa, Artificial Sequence
  source: /note="Description of Artificial Sequence: Synthetic peptide"
  source: /note="MAGE-A4"
EVDPASNTY

SEQ ID NO: 289 - protein, 10 aa, Artificial Sequence
  source: /note="Description of Artificial Sequence: Synthetic peptide"
  source: /note="MAGE-A4"
GVYDGREHTV

SEQ ID NO: 290 - protein, 9 aa, Artificial Sequence
  source: /note="Description of Artificial Sequence: Synthetic peptide"
  source: /note="MAGE-A4"
NYKRCFPVI

SEQ ID NO: 291 - protein, 8 aa, Artificial Sequence
  source: /note="Description of Artificial Sequence: Synthetic peptide"
  source: /note="MAGE-A4"
SESLKMIF

SEQ ID NO: 292 - protein, 9 aa, Artificial Sequence
  source: /note="Description of Artificial Sequence: Synthetic peptide"
  source: /note="MAGE-A6"
MVKISGGPR

SEQ ID NO: 293 - protein, 9 aa, Artificial Sequence
  source: /note="Description of Artificial Sequence: Synthetic peptide"
  source: /note="MAGE-A6"
EVDPIGHVY

SEQ ID NO: 294 - protein, 10 aa, Artificial Sequence
  source: /note="Description of Artificial Sequence: Synthetic peptide"
  source: /note="MAGE-A6"
REPVTKAEML

SEQ ID NO: 295 - protein, 9 aa, Artificial Sequence
  source: /note="Description of Artificial Sequence: Synthetic peptide"
  source: /note="MAGE-A6"
EGDCAPEEK

SEQ ID NO: 296 - protein, 9 aa, Artificial Sequence
  source: /note="Description of Artificial Sequence: Synthetic peptide"
  source: /note="MAGE-A6"
ISGGPRISY

SEQ ID NO: 297 - protein, 14 aa, Artificial Sequence
  source: /note="Description of Artificial Sequence: Synthetic peptide"
  source: /note="MAGE-A6"
LLKYRAREPVTKAE

SEQ ID NO: 298 - protein, 9 aa, Artificial Sequence
  source: /note="Description of Artificial Sequence: Synthetic peptide"
  source: /note="MAGE-A9"
ALSVMGVYV

SEQ ID NO: 299 - protein, 10 aa, Artificial Sequence
  source: /note="Description of Artificial Sequence: Synthetic peptide"
  source: /note="MAGE-A10"
GLYDGMEHLL

SEQ ID NO: 300 - protein, 9 aa, Artificial Sequence
  source: /note="Description of Artificial Sequence: Synthetic peptide"
  source: /note="MAGE-A10"
DPARYEFLW

SEQ ID NO: 301 - protein, 10 aa, Artificial Sequence
  source: /note="Description of Artificial Sequence: Synthetic peptide"
  source: /note="MAGE-A12 m"
FLWGPRALVE

SEQ ID NO: 302 - protein, 9 aa, Artificial Sequence
  source: /note="Description of Artificial Sequence: Synthetic peptide"
  source: /note="MAGE-A12 m"
VRIGHLYIL

SEQ ID NO: 303 - protein, 9 aa, Artificial Sequence
  source: /note="Description of Artificial Sequence: Synthetic peptide"
  source: /note="MAGE-A12 m"
EGDCAPEEK

SEQ ID NO: 304 - protein, 15 aa, Artificial Sequence
  source: /note="Description of Artificial Sequence: Synthetic peptide"
  source: /note="MAGE-A12 m"
REPFTKAEMLGSVIR

SEQ ID NO: 305 - protein, 14 aa, Artificial Sequence
  source: /note="Description of Artificial Sequence: Synthetic peptide"
  source: /note="MAGE-A12 m"
AELVHFLLLKYRAR

SEQ ID NO: 306 - protein, 10 aa, Artificial Sequence
  source: /note="Description of Artificial Sequence: Synthetic peptide"
  source: /note="MAGE-C1"
ILFGISLREV

SEQ ID NO: 307 - protein, 9 aa, Artificial Sequence
  source: /note="Description of Artificial Sequence: Synthetic peptide"
  source: /note="MAGE-C1"
KVVEFLAML

SEQ ID NO: 308 - protein, 13 aa, Artificial Sequence
  source: /note="Description of Artificial Sequence: Synthetic peptide"
  source: /note="MAGE-C1"
SSALLSIFQSSPE

SEQ ID NO: 309 - protein, 9 aa, Artificial Sequence
  source: /note="Description of Artificial Sequence: Synthetic peptide"
  source: /note="MAGE-C1"
SFSYTLLSL

SEQ ID NO: 310 - protein, 9 aa, Artificial Sequence
  source: /note="Description of Artificial Sequence: Synthetic peptide"
  source: /note="MAGE-C1"
VSSFFSYTL

SEQ ID NO: 311 - protein, 10 aa, Artificial Sequence
  source: /note="Description of Artificial Sequence: Synthetic peptide"
  source: /note="MAGE-C2"
LLFGLALIEV

SEQ ID NO: 312 - protein, 9 aa, Artificial Sequence
  source: /note="Description of Artificial Sequence: Synthetic peptide"
  source: /note="MAGE-C2"
ALKDVEERV

SEQ ID NO: 313 - protein, 9 aa, Artificial Sequence
  source: /note="Description of Artificial Sequence: Synthetic peptide"
  source: /note="MAGE-C2"
SESIKKKVL

SEQ ID NO: 314 - protein, 9 aa, Artificial Sequence
  source: /note="Description of Artificial Sequence: Synthetic peptide"
  source: /note="MAGE-C2"
ASSTLYLVF

SEQ ID NO: 315 - protein, 15 aa, Artificial Sequence
  source: /note="Description of Artificial Sequence: Synthetic peptide"
  source: /note="MAGE-C2"
SSTLYLVFSPSSFST

SEQ ID NO: 316 - protein, 20 aa, Artificial Sequence
  source: /note="Description of Artificial Sequence: Synthetic peptide"
  source: /note="mucink"
PDTRPAPGSTAPPAHGVTSA

SEQ ID NO: 317 - protein, 9 aa, Artificial Sequence
  source: /note="Description of Artificial Sequence: Synthetic peptide"
  source: /note="NA88-A"
QGQHFLQKV

SEQ ID NO: 318 - protein, 9 aa, Artificial Sequence
  source: /note="Description of Artificial Sequence: Synthetic peptide"
  source: /note="NY-ESO-1 / LAGE-2"
SLLMWITQC

SEQ ID NO: 319 - protein, 11 aa, Artificial Sequence
  source: /note="Description of Artificial Sequence: Synthetic peptide"
  source: /note="NY-ESO-1 / LAGE-2"
MLMAQEALAFL

SEQ ID NO: 320 - protein, 11 aa, Artificial Sequence
  source: /note="Description of Artificial Sequence: Synthetic peptide"
  source: /note="NY-ESO-1 / LAGE-2"
YLAMPFATPME

SEQ ID NO: 321 - protein, 10 aa, Artificial Sequence
  source: /note="Description of Artificial Sequence: Synthetic peptide"
  source: /note="NY-ESO-1 / LAGE-2"
ASGPGGGAPR

SEQ ID NO: 322 - protein, 10 aa, Artificial Sequence
  source: /note="Description of Artificial Sequence: Synthetic peptide"
  source: /note="NY-ESO-1 / LAGE-2"
LAAQERRVPR

SEQ ID NO: 323 - protein, 10 aa, Artificial Sequence
  source: /note="Description of Artificial Sequence: Synthetic peptide"
  source: /note="NY-ESO-1 / LAGE-2"
TVSGNILTIR

SEQ ID NO: 324 - protein, 13 aa, Artificial Sequence
  source: /note="Description of Artificial Sequence: Synthetic peptide"
  source: /note="NY-ESO-1 / LAGE-2"
APRGPHGGAASGL

SEQ ID NO: 325 - protein, 11 aa, Artificial Sequence
  source: /note="Description of Artificial Sequence: Synthetic peptide"
  source: /note="NY-ESO-1 / LAGE-2"
MPFATPMEAEL

SEQ ID NO: 326 - protein, 12 aa, Artificial Sequence
  source: /note="Description of Artificial Sequence: Synthetic peptide"
  source: /note="NY-ESO-1 / LAGE-2"
KEFTVSGNILTI

SEQ ID NO: 327 - protein, 9 aa, Artificial Sequence
  source: /note="Description of Artificial Sequence: Synthetic peptide"
  source: /note="NY-ESO-1 / LAGE-2"
MPFATPMEA

SEQ ID NO: 328 - protein, 9 aa, Artificial Sequence
  source: /note="Description of Artificial Sequence: Synthetic peptide"
  source: /note="NY-ESO-1 / LAGE-2"
FATPMEAEL

SEQ ID NO: 329 - protein, 11 aa, Artificial Sequence
  source: /note="Description of Artificial Sequence: Synthetic peptide"
  source: /note="NY-ESO-1 / LAGE-2"
FATPMEAELAR

SEQ ID NO: 330 - protein, 9 aa, Artificial Sequence
  source: /note="Description of Artificial Sequence: Synthetic peptide"
  source: /note="NY-ESO-1 / LAGE-2"
LAMPFATPM

SEQ ID NO: 331 - protein, 9 aa, Artificial Sequence
  source: /note="Description of Artificial Sequence: Synthetic peptide"
  source: /note="NY-ESO-1 / LAGE-2"
ARGPESRLL

SEQ ID NO: 332 - protein, 14 aa, Artificial Sequence
  source: /note="Description of Artificial Sequence: Synthetic peptide"
  source: /note="NY-ESO-1 / LAGE-2"
SLLMWITQCFLPVF

SEQ ID NO: 333 - protein, 25 aa, Artificial Sequence
  source: /note="Description of Artificial Sequence: Synthetic peptide"
  source: /note="NY-ESO-1 / LAGE-2"
LLEFYLAMPFATPMEAELARRSLAQ

SEQ ID NO: 334 - protein, 12 aa, Artificial Sequence
  source: /note="Description of Artificial Sequence: Synthetic peptide"
  source: /note="NY-ESO-1 / LAGE-2"
EFYLAMPFATPM

SEQ ID NO: 335 - protein, 25 aa, Artificial Sequence
  source: /note="Description of Artificial Sequence: Synthetic peptide"
  source: /note="NY-ESO-1 / LAGE-2"
PGVLLKEFTVSGNILTIRLTAADHR

SEQ ID NO: 336 - protein, 12 aa, Artificial Sequence
  source: /note="Description of Artificial Sequence: Synthetic peptide"
  source: /note="NY-ESO-1 / LAGE-2"
RLLEFYLAMPFA

SEQ ID NO: 337 - protein, 20 aa, Artificial Sequence
  source: /note="Description of Artificial Sequence: Synthetic peptide"
  source: /note="NY-ESO-1 / LAGE-2"
QGAMLAAQERRVPRAAEVPR

SEQ ID NO: 338 - protein, 13 aa, Artificial Sequence
  source: /note="Description of Artificial Sequence: Synthetic peptide"
  source: /note="NY-ESO-1 / LAGE-2"
PFATPMEAELARR

SEQ ID NO: 339 - protein, 20 aa, Artificial Sequence
  source: /note="Description of Artificial Sequence: Synthetic peptide"
  source: /note="NY-ESO-1 / LAGE-2"
PGVLLKEFTVSGNILTIRLT

SEQ ID NO: 340 - protein, 10 aa, Artificial Sequence
  source: /note="Description of Artificial Sequence: Synthetic peptide"
  source: /note="NY-ESO-1 / LAGE-2"
VLLKEFTVSG

SEQ ID NO: 341 - protein, 18 aa, Artificial Sequence
  source: /note="Description of Artificial Sequence: Synthetic peptide"
  source: /note="NY-ESO-1 / LAGE-2"
AADHRQLQLSISSCLQQL

SEQ ID NO: 342 - protein, 25 aa, Artificial Sequence
  source: /note="Description of Artificial Sequence: Synthetic peptide"
  source: /note="NY-ESO-1 / LAGE-2"
LLEFYLAMPFATPMEAELARRSLAQ

SEQ ID NO: 343 - protein, 15 aa, Artificial Sequence
  source: /note="Description of Artificial Sequence: Synthetic peptide"
  source: /note="NY-ESO-1 / LAGE-2"
LKEFTVSGNILTIRL

SEQ ID NO: 344 - protein, 25 aa, Artificial Sequence
  source: /note="Description of Artificial Sequence: Synthetic peptide"
  source: /note="NY-ESO-1 / LAGE-2"
PGVLLKEFTVSGNILTIRLTAADHR

SEQ ID NO: 345 - protein, 11 aa, Artificial Sequence
  source: /note="Description of Artificial Sequence: Synthetic peptide"
  source: /note="NY-ESO-1 / LAGE-2"
KEFTVSGNILT

SEQ ID NO: 346 - protein, 14 aa, Artificial Sequence
  source: /note="Description of Artificial Sequence: Synthetic peptide"
  source: /note="NY-ESO-1 / LAGE-2"
LLEFYLAMPFATPM

SEQ ID NO: 347 - protein, 14 aa, Artificial Sequence
  source: /note="Description of Artificial Sequence: Synthetic peptide"
  source: /note="NY-ESO-1 / LAGE-2"
AGATGGRGPRGAGA

SEQ ID NO: 348 - protein, 9 aa, Artificial Sequence
  source: /note="Description of Artificial Sequence: Synthetic peptide"
  source: /note="SAGE"
LYATVIHDI

SEQ ID NO: 349 - protein, 9 aa, Artificial Sequence
  source: /note="Description of Artificial Sequence: Synthetic peptide"
  source: /note="Sp17"
ILDSSEEDK

SEQ ID NO: 350 - protein, 9 aa, Artificial Sequence
  source: /note="Description of Artificial Sequence: Synthetic peptide"
  source: /note="SSX-2"
KASEKIFYV

SEQ ID NO: 351 - protein, 16 aa, Artificial Sequence
  source: /note="Description of Artificial Sequence: Synthetic peptide"
  source: /note="SSX-2"
EKIQKAFDDIAKYFSK

SEQ ID NO: 352 - protein, 11 aa, Artificial Sequence
  source: /note="Description of Artificial Sequence: Synthetic peptide"
  source: /note="SSX-2"
FGRLQGISPKI

SEQ ID NO: 353 - protein, 18 aa, Artificial Sequence
  source: /note="Description of Artificial Sequence: Synthetic peptide"
  source: /note="SSX-2"
WEKMKASEKIFYVYMKRK

SEQ ID NO: 354 - protein, 15 aa, Artificial Sequence
  source: /note="Description of Artificial Sequence: Synthetic peptide"
  source: /note="SSX-2"
KIFYVYMKRKYEAMT

SEQ ID NO: 355 - protein, 14 aa, Artificial Sequence
  source: /note="Description of Artificial Sequence: Synthetic peptide"
  source: /note="SSX-2"
KIFYVYMKRKYEAM

SEQ ID NO: 356 - protein, 20 aa, Artificial Sequence
  source: /note="Description of Artificial Sequence: Synthetic peptide"
  source: /note="SSX-4"
INKTSGPKRGKHAWTHRLRE

SEQ ID NO: 357 - protein, 20 aa, Artificial Sequence
  source: /note="Description of Artificial Sequence: Synthetic peptide"
  source: /note="SSX-4"
YFSKKEWEKMKSSEKIVYVY

SEQ ID NO: 358 - protein, 20 aa, Artificial Sequence
  source: /note="Description of Artificial Sequence: Synthetic peptide"
  source: /note="SSX-4"
MKLNYEVMTKLGFKVTLPPF

SEQ ID NO: 359 - protein, 20 aa, Artificial Sequence
  source: /note="Description of Artificial Sequence: Synthetic peptide"
  source: /note="SSX-4"
KHAWTHRLRERKQLVVYEEI

SEQ ID NO: 360 - protein, 20 aa, Artificial Sequence
  source: /note="Description of Artificial Sequence: Synthetic peptide"
  source: /note="SSX-4"
LGFKVTLPPFMRSKRAADFH

SEQ ID NO: 361 - protein, 20 aa, Artificial Sequence
  source: /note="Description of Artificial Sequence: Synthetic peptide"
  source: /note="SSX-4"
KSSEKIVYVYMKLNYEVMTK

SEQ ID NO: 362 - protein, 20 aa, Artificial Sequence
  source: /note="Description of Artificial Sequence: Synthetic peptide"
  source: /note="SSX-4"
KHAWTHRLRERKQLVVYEEI

SEQ ID NO: 363 - protein, 9 aa, Artificial Sequence
  source: /note="Description of Artificial Sequence: Synthetic peptide"
  source: /note="TAG-1"
SLGWLFLLL

SEQ ID NO: 364 - protein, 9 aa, Artificial Sequence
  source: /note="Description of Artificial Sequence: Synthetic peptide"
  source: /note="TAG-1"
LSRLSNRLL

SEQ ID NO: 365 - protein, 15 aa, Artificial Sequence
  source: /note="Description of Artificial Sequence: Synthetic peptide"
  source: /note="TRAG-3"
CEFHACWPAFTVLGE

SEQ ID NO: 366 - protein, 15 aa, Artificial Sequence
  source: /note="Description of Artificial Sequence: Synthetic peptide"
  source: /note="TRAG-3"
CEFHACWPAFTVLGE

SEQ ID NO: 367 - protein, 10 aa, Artificial Sequence
  source: /note="Description of Artificial Sequence: Synthetic peptide"
  source: /note="TRP2-INT2g"
EVISCKLIKR

SEQ ID NO: 368 - protein, 9 aa, Artificial Sequence
  source: /note="Description of Artificial Sequence: Synthetic peptide"
  source: /note="XAGE-1b/GAGED2a"
RQKKIRIQL

SEQ ID NO: 369 - protein, 16 aa, Artificial Sequence
  source: /note="Description of Artificial Sequence: Synthetic peptide"
  source: /note="XAGE-1b/GAGED2a"
HLGSRQKKIRIQLRSQ

SEQ ID NO: 370 - protein, 17 aa, Artificial Sequence
  source: /note="Description of Artificial Sequence: Synthetic peptide"
  source: /note="XAGE-1b/GAGED2a"
CATWKVICKSCISQTPG

SEQ ID NO: 371 - protein, 10 aa, Artificial Sequence
  source: /note="Description of Artificial Sequence: Synthetic peptide"
  source: /note="CEA"
YLSGANLNLG

SEQ ID NO: 372 - protein, 9 aa, Artificial Sequence
  source: /note="Description of Artificial Sequence: Synthetic peptide"
  source: /note="CEA"
IMIGVLVGV

SEQ ID NO: 373 - protein, 9 aa, Artificial Sequence
  source: /note="Description of Artificial Sequence: Synthetic peptide"
  source: /note="CEA"
GVLVGVALI

SEQ ID NO: 374 - protein, 9 aa, Artificial Sequence
  source: /note="Description of Artificial Sequence: Synthetic peptide"
  source: /note="CEA"
HLFGYSWYK

SEQ ID NO: 375 - protein, 10 aa, Artificial Sequence
  source: /note="Description of Artificial Sequence: Synthetic peptide"
  source: /note="CEA"
QYSWFVNGTF

SEQ ID NO: 376 - protein, 9 aa, Artificial Sequence
  source: /note="Description of Artificial Sequence: Synthetic peptide"
  source: /note="CEA"
TYACFVSNL

SEQ ID NO: 377 - protein, 15 aa, Artificial Sequence
  source: /note="Description of Artificial Sequence: Synthetic peptide"
  source: /note="CEA"
AYVCGIQNSVSANRS

SEQ ID NO: 378 - protein, 25 aa, Artificial Sequence
  source: /note="Description of Artificial Sequence: Synthetic peptide"
  source: /note="CEA"
DTGFYTLHVIKSDLVNEEATGQFRV

SEQ ID NO: 379 - protein, 15 aa, Artificial Sequence
  source: /note="Description of Artificial Sequence: Synthetic peptide"
  source: /note="CEA"
YSWRINGIPQQHTQV

SEQ ID NO: 380 - protein, 13 aa, Artificial Sequence
  source: /note="Description of Artificial Sequence: Synthetic peptide"
  source: /note="CEA"
TYYRPGVNLSLSC

SEQ ID NO: 381 - protein, 13 aa, Artificial Sequence
  source: /note="Description of Artificial Sequence: Synthetic peptide"
  source: /note="CEA"
EIIYPNASLLIQN

SEQ ID NO: 382 - protein, 15 aa, Artificial Sequence
  source: /note="Description of Artificial Sequence: Synthetic peptide"
  source: /note="CEA"
YACFVSNLATGRNNS

SEQ ID NO: 383 - protein, 13 aa, Artificial Sequence
  source: /note="Description of Artificial Sequence: Synthetic peptide"
  source: /note="CEA"
LWWVNNQSLPVSP

SEQ ID NO: 384 - protein, 13 aa, Artificial Sequence
  source: /note="Description of Artificial Sequence: Synthetic peptide"
  source: /note="CEA"
EIIYPNASLLIQN

SEQ ID NO: 385 - protein, 13 aa, Artificial Sequence
  source: /note="Description of Artificial Sequence: Synthetic peptide"
  source: /note="CEA"
NSIVKSITVSASG

SEQ ID NO: 386 - protein, 9 aa, Artificial Sequence
  source: /note="Description of Artificial Sequence: Synthetic peptide"
  source: /note="gp100 / Pmel17"
KTWGQYWQV

SEQ ID NO: 387 - protein, 10 aa, Artificial Sequence
  source: /note="Description of Artificial Sequence: Synthetic peptide"
  source: /note="gp100 / Pmel17"
  VARIANT (1)..(1): /replace=" "
  MISC_FEATURE (1)..(10): /note="Variant residues given in the sequence have no preference with respect to those in the annotations for variant positions"
AMLGTHTMEV

SEQ ID NO: 388 - protein, 9 aa, Artificial Sequence
  source: /note="Description of Artificial Sequence: Synthetic peptide"
  source: /note="gp100 / Pmel17"
ITDQVPFSV

SEQ ID NO: 389 - protein, 9 aa, Artificial Sequence
  source: /note="Description of Artificial Sequence: Synthetic peptide"
  source: /note="gp100 / Pmel17"
YLEPGPVTA

SEQ ID NO: 390 - protein, 10 aa, Artificial Sequence
  source: /note="Description of Artificial Sequence: Synthetic peptide"
  source: /note="gp100 / Pmel17"
LLDGTATLRL

SEQ ID NO: 391 - protein, 10 aa, Artificial Sequence
  source: /note="Description of Artificial Sequence: Synthetic peptide"
  source: /note="gp100 / Pmel17"
VLYRYGSFSV

SEQ ID NO: 392 - protein, 10 aa, Artificial Sequence
  source: /note="Description of Artificial Sequence: Synthetic peptide"
  source: /note="gp100 / Pmel17"
SLADTNSLAV

SEQ ID NO: 393 - protein, 9 aa, Artificial Sequence
  source: /note="Description of Artificial Sequence: Synthetic peptide"
  source: /note="gp100 / Pmel17"
RLMKQDFSV

SEQ ID NO: 394 - protein, 9 aa, Artificial Sequence
  source: /note="Description of Artificial Sequence: Synthetic peptide"
  source: /note="gp100 / Pmel17"
RLPRIFCSC

SEQ ID NO: 395 - protein, 9 aa, Artificial Sequence
  source: /note="Description of Artificial Sequence: Synthetic peptide"
  source: /note="gp100 / Pmel17"
LIYRRRLMK

SEQ ID NO: 396 - protein, 9 aa, Artificial Sequence
  source: /note="Description of Artificial Sequence: Synthetic peptide"
  source: /note="gp100 / Pmel17"
ALLAVGATK

SEQ ID NO: 397 - protein, 10 aa, Artificial Sequence
  source: /note="Description of Artificial Sequence: Synthetic peptide"
  source: /note="gp100 / Pmel17"
IALNFPGSQK

SEQ ID NO: 398 - protein, 9 aa, Artificial Sequence
  source: /note="Description of Artificial Sequence: Synthetic peptide"
  source: /note="gp100 / Pmel17"
RSYVPLAHR

SEQ ID NO: 399 - protein, 9 aa, Artificial Sequence
  source: /note="Description of Artificial Sequence: Synthetic peptide"
  source: /note="gp100 / Pmel17"
ALNFPGSQK

SEQ ID NO: 400 - protein, 9 aa, Artificial Sequence
  source: /note="Description of Artificial Sequence: Synthetic peptide"
  source: /note="gp100 / Pmel17"
VYFFLPDHL

SEQ ID NO: 401 - protein, 9 aa, Artificial Sequence
  source: /note="Description of Artificial Sequence: Synthetic peptide"
  source: /note="gp100 / Pmel17"
RTKQLYPEW

SEQ ID NO: 402 - protein, 10 aa, Artificial Sequence
  source: /note="Description of Artificial Sequence: Synthetic peptide"
  source: /note="gp100 / Pmel17"
HTMEVTVYHR

SEQ ID NO: 403 - protein, 9 aa, Artificial Sequence
  source: /note="Description of Artificial Sequence: Synthetic peptide"
  source: /note="gp100 / Pmel17"
SSPGCQPPA

SEQ ID NO: 404 - protein, 10 aa, Artificial Sequence
  source: /note="Description of Artificial Sequence: Synthetic peptide"
  source: /note="gp100 / Pmel17"
VPLDCVLYRY

SEQ ID NO: 405 - protein, 9 aa, Artificial Sequence
  source: /note="Description of Artificial Sequence: Synthetic peptide"
  source: /note="gp100 / Pmel17"
LPHSSSHWL

SEQ ID NO: 406 - protein, 8 aa, Artificial Sequence
  source: /note="Description of Artificial Sequence: Synthetic peptide"
  source: /note="gp100 / Pmel17"
SNDGPTLI

SEQ ID NO: 407 - protein, 15 aa, Artificial Sequence
  source: /note="Description of Artificial Sequence: Synthetic peptide"
  source: /note="gp100 / Pmel17"
GRAMLGTHTMEVTVY

SEQ ID NO: 408 - protein, 16 aa, Artificial Sequence
  source: /note="Description of Artificial Sequence: Synthetic peptide"
  source: /note="gp100 / Pmel17"
WNRQLYPEWTEAQRLD

SEQ ID NO: 409 - protein, 18 aa, Artificial Sequence
  source: /note="Description of Artificial Sequence: Synthetic peptide"
  source: /note="gp100 / Pmel17"
TTEWVETTARELPIPEPE

SEQ ID NO: 410 - protein, 17 aa, Artificial Sequence
  source: /note="Description of Artificial Sequence: Synthetic peptide"
  source: /note="gp100 / Pmel17"
TGRAMLGTHTMEVTVYH

SEQ ID NO: 411 - protein, 9 aa, Artificial Sequence
  source: /note="Description of Artificial Sequence: Synthetic peptide"
  source: /note="mammaglobin-A"
PLLENVISK

SEQ ID NO: 412 - protein, 30 aa, Artificial Sequence
  source: /note="Description of Artificial Sequence: Synthetic polypeptide"
  source: /note="Melan-A / MART-1"
YTTAEEAAGIGILTVILGVLLLIGCWYCRR

SEQ ID NO: 413 - protein, 14 aa, Artificial Sequence
  source: /note="Description of Artificial Sequence: Synthetic peptide"
  source: /note="Melan-A / MART-1"
AAGIGILTVILGVL

SEQ ID NO: 414 - protein, 14 aa, Artificial Sequence
  source: /note="Description of Artificial Sequence: Synthetic peptide"
  source: /note="Melan-A / MART-1"
APPAYEKLPSAEQF

SEQ ID NO: 415 - protein, 23 aa, Artificial Sequence
  source: /note="Description of Artificial Sequence: Synthetic peptide"
  source: /note="Melan-A / MART-1"
RNGYRALMDKSLHVGTQCALTRR

SEQ ID NO: 416 - protein, 20 aa, Artificial Sequence
  source: /note="Description of Artificial Sequence: Synthetic peptide"
  source: /note="Melan-A / MART-1"
MPREDAHFIYGYPKKGHGHS

SEQ ID NO: 417 - protein, 20 aa, Artificial Sequence
  source: /note="Description of Artificial Sequence: Synthetic peptide"
  source: /note="Melan-A / MART-1"
KNCEPVVPNAPPAYEKLSAE

SEQ ID NO: 418 - protein, 9 aa, Artificial Sequence
  source: /note="Description of Artificial Sequence: Synthetic peptide"
  source: /note="NY-BR-1"
SLSKILDTV

SEQ ID NO: 419 - protein, 9 aa, Artificial Sequence
  source: /note="Description of Artificial Sequence: Synthetic peptide"
  source: /note="OA1"
LYSACFWWL

SEQ ID NO: 420 - protein, 9 aa, Artificial Sequence
  source: /note="Description of Artificial Sequence: Synthetic peptide"
  source: /note="PAP"
FLFLLFFWL

SEQ ID NO: 421 - protein, 9 aa, Artificial Sequence
  source: /note="Description of Artificial Sequence: Synthetic peptide"
  source: /note="PAP"
TLMSAMTNL

SEQ ID NO: 422 - protein, 9 aa, Artificial Sequence
  source: /note="Description of Artificial Sequence: Synthetic peptide"
  source: /note="PAP"
ALDVYNGLL

SEQ ID NO: 423 - protein, 10 aa, Artificial Sequence
  source: /note="Description of Artificial Sequence: Synthetic peptide"
  source: /note="PSA"
FLTPKKLQCV

SEQ ID NO: 424 - protein, 10 aa, Artificial Sequence
  source: /note="Description of Artificial Sequence: Synthetic peptide"
  source: /note="PSA"
VISNDVCAQV

SEQ ID NO: 425 - protein, 9 aa, Artificial Sequence
  source: /note="Description of Artificial Sequence: Synthetic peptide"
  source: /note="RAB38 / NY-MEL-1"
VLHWDPETV

SEQ ID NO: 426 - protein, 9 aa, Artificial Sequence
  source: /note="Description of Artificial Sequence: Synthetic peptide"
  source: /note="TRP-1 / gp75"
MSLQRQFLR

SEQ ID NO: 427 - protein, 21 aa, Artificial Sequence
  source: /note="Description of Artificial Sequence: Synthetic peptide"
  source: /note="TRP-1 / gp75"
ISPNSVFSQWRVVCDSLEDYD

SEQ ID NO: 428 - protein, 10 aa, Artificial Sequence
  source: /note="Description of Artificial Sequence: Synthetic peptide"
  source: /note="TRP-1 / gp75"
SLPYWNFATG

SEQ ID NO: 429 - protein, 15 aa, Artificial Sequence
  source: /note="Description of Artificial Sequence: Synthetic peptide"
  source: /note="TRP-1 / gp75"
SQWRVVCDSLEDYDT

SEQ ID NO: 430 - protein, 9 aa, Artificial Sequence
  source: /note="Description of Artificial Sequence: Synthetic peptide"
  source: /note="TRP-2"
SVYDFFVWL

SEQ ID NO: 431 - protein, 9 aa, Artificial Sequence
  source: /note="Description of Artificial Sequence: Synthetic peptide"
  source: /note="TRP-2"
TLDSQVMSL

SEQ ID NO: 432 - protein, 9 aa, Artificial Sequence
  source: /note="Description of Artificial Sequence: Synthetic peptide"
  source: /note="TRP-2"
LLGPGRPYR

SEQ ID NO: 433 - protein, 9 aa, Artificial Sequence
  source: /note="Description of Artificial Sequence: Synthetic peptide"
  source: /note="TRP-2"
ANDPIFVVL

SEQ ID NO: 434 - protein, 15 aa, Artificial Sequence
  source: /note="Description of Artificial Sequence: Synthetic peptide"
  source: /note="TRP-2"
QCTEVRADTRPWSGP

SEQ ID NO: 435 - protein, 10 aa, Artificial Sequence
  source: /note="Description of Artificial Sequence: Synthetic peptide"
  source: /note="TRP-2"
ALPYWNFATG

SEQ ID NO: 436 - protein, 9 aa, Artificial Sequence
  source: /note="Description of Artificial Sequence: Synthetic peptide"
  source: /note="tyrosinase"
KCDICTDEY

SEQ ID NO: 437 - protein, 11 aa, Artificial Sequence
  source: /note="Description of Artificial Sequence: Synthetic peptide"
  source: /note="tyrosinase"
SSDYVIPIGTY

SEQ ID NO: 438 - protein, 9 aa, Artificial Sequence
  source: /note="Description of Artificial Sequence: Synthetic peptide"
  source: /note="tyrosinase"
MLLAVLYCL

SEQ ID NO: 439 - protein, 10 aa, Artificial Sequence
  source: /note="Description of Artificial Sequence: Synthetic peptide"
  source: /note="tyrosinase"
CLLWSFQTSA

SEQ ID NO: 440 - protein, 9 aa, Artificial Sequence
  source: /note="Description of Artificial Sequence: Synthetic peptide"
  source: /note="tyrosinase"
YMDGTMSQV

SEQ ID NO: 441 - protein, 9 aa, Artificial Sequence
  source: /note="Description of Artificial Sequence: Synthetic peptide"
  source: /note="tyrosinase"
AFLPWHRLF

SEQ ID NO: 442 - protein, 11 aa, Artificial Sequence
  source: /note="Description of Artificial Sequence: Synthetic peptide"
  source: /note="tyrosinase"
IYMDGTADFSF

SEQ ID NO: 443 - protein, 9 aa, Artificial Sequence
  source: /note="Description of Artificial Sequence: Synthetic peptide"
  source: /note="tyrosinase"
QCSGNFMGF

SEQ ID NO: 444 - protein, 12 aa, Artificial Sequence
  source: /note="Description of Artificial Sequence: Synthetic peptide"
  source: /note="tyrosinase"
TPRLPSSADVEF

SEQ ID NO: 445 - protein, 9 aa, Artificial Sequence
  source: /note="Description of Artificial Sequence: Synthetic peptide"
  source: /note="tyrosinase"
LPSSADVEF

SEQ ID NO: 446 - protein, 10 aa, Artificial Sequence
  source: /note="Description of Artificial Sequence: Synthetic peptide"
  source: /note="tyrosinase"
LHHAFVDSIF

SEQ ID NO: 447 - protein, 10 aa, Artificial Sequence
  source: /note="Description of Artificial Sequence: Synthetic peptide"
  source: /note="tyrosinase"
SEIWRDIDFD

SEQ ID NO: 448 - protein, 15 aa, Artificial Sequence
  source: /note="Description of Artificial Sequence: Synthetic peptide"
  source: /note="tyrosinase"
QNILLSNAPLGPQFP

SEQ ID NO: 449 - protein, 13 aa, Artificial Sequence
  source: /note="Description of Artificial Sequence: Synthetic peptide"
  source: /note="tyrosinase"
SYLQDSDPDSFQD

SEQ ID NO: 450 - protein, 21 aa, Artificial Sequence [sequence omitted]

SEQ ID NO: 451 - protein, 9 aa, Artificial Sequence
  source: /note="Description of Artificial Sequence: Synthetic peptide"
  source: /note="adipophilin"
SVASTITGV

SEQ ID NO: 452 - protein, 10 aa, Artificial Sequence
  source: /note="Description of Artificial Sequence: Synthetic peptide"
  source: /note="AIM-2"
RSDSGQQARY

SEQ ID NO: 453 - protein, 9 aa, Artificial Sequence
  source: /note="Description of Artificial Sequence: Synthetic peptide"
  source: /note="ALDH1A1"
LLYKLADLI

SEQ ID NO: 454 - protein, 10 aa, Artificial Sequence
  source: /note="Description of Artificial Sequence: Synthetic peptide"
  source: /note="BCLX(L)"
YLNDHLEPWI

SEQ ID NO: 455 - protein, 9 aa, Artificial Sequence
  source: /note="Description of Artificial Sequence: Synthetic peptide"
  source: /note="BING-4"
CQWGRLWQL

SEQ ID NO: 456 - protein, 10 aa, Artificial Sequence
  source: /note="Description of Artificial Sequence: Synthetic peptide"
  source: /note="CALCA"
VLLQAGSLHA

SEQ ID NO: 457 - protein, 9 aa, Artificial Sequence
  source: /note="Description of Artificial Sequence: Synthetic peptide"
  source: /note="CD45"
KFLDALISL

SEQ ID NO: 458 - protein, 9 aa, Artificial Sequence
  source: /note="Description of Artificial Sequence: Synthetic peptide"
  source: /note="CD274"
LLNAFTVTV

SEQ ID NO: 459 - protein, 9 aa, Artificial Sequence
  source: /note="Description of Artificial Sequence: Synthetic peptide"
  source: /note="CPSF"
KVHPVIWSL

SEQ ID NO: 460 - protein, 10 aa, Artificial Sequence
  source: /note="Description of Artificial Sequence: Synthetic peptide"
  source: /note="peptide"
LMLQNALTTM

SEQ ID NO: 461 - protein, 9 aa, Artificial Sequence
  source: /note="Description of Artificial Sequence: Synthetic peptide"
  source: /note="cyclinD1"
LLGATCMFV

SEQ ID NO: 462 - protein, 15 aa, Artificial Sequence
  source: /note="Description of Artificial Sequence: Synthetic peptide"
  source: /note="peptide"
NPPSMVAAGSVVAAV

SEQ ID NO: 463 - protein, 10 aa, Artificial Sequence
  source: /note="Description of Artificial Sequence: Synthetic peptide"
  source: /note="DKK1"
ALGGHPLLGV

SEQ ID NO: 464 - protein, 9 aa, Artificial Sequence
  source: /note="Description of Artificial Sequence: Synthetic peptide"
  source: /note="ENAH(hMena)"
TMNGSKSPV

SEQ ID NO: 465 - protein, 9 aa, Artificial Sequence
  source: /note="Description of Artificial Sequence: Synthetic peptide"
  source: /note="EpCAM"
RYQLDPKFI

SEQ ID NO: 466 - protein, 12 aa, Artificial Sequence
  source: /note="Description of Artificial Sequence: Synthetic peptide"
  source: /note="EphA3"
DVTFNIICKKCG

SEQ ID NO: 467 - protein, 9 aa, Artificial Sequence
  source: /note="Description of Artificial Sequence: Synthetic peptide"
  source: /note="EZH2"
FMVEDETVL

SEQ ID NO: 468 - protein, 10 aa, Artificial Sequence
  source: /note="Description of Artificial Sequence: Synthetic peptide"
  source: /note="FGF5"
NTYASPRFKF

SEQ ID NO: 469 - protein, 9 aa, Artificial Sequence
  source: /note="Description of Artificial Sequence: Synthetic peptide"
  source: /note="glypican-3"
FVGEFFTDV

SEQ ID NO: 470 - protein, 9 aa, Artificial Sequence
  source: /note="Description of Artificial Sequence: Synthetic peptide"
  source: /note="G250 / MN / CAIX"
HLSTAFARV

SEQ ID NO: 471 - protein, 9 aa, Artificial Sequence
  source: /note="Description of Artificial Sequence: Synthetic peptide"
  source: /note="HER-2 / neu"
KIFGSLAFL

SEQ ID NO: 472 - protein, 9 aa, Artificial Sequence
  source: /note="Description of Artificial Sequence: Synthetic peptide"
  source: /note="HER-2 / neu"
IISAVVGIL

SEQ ID NO: 473 - protein, 9 aa, Artificial Sequence
  source: /note="Description of Artificial Sequence: Synthetic peptide"
  source: /note="HER-2 / neu"
ALCRWGLLL

SEQ ID NO: 474 - protein, 9 aa, Artificial Sequence
  source: /note="Description of Artificial Sequence: Synthetic peptide"
  source: /note="HER-2 / neu"
ILHNGAYSL

SEQ ID NO: 475 - protein, 9 aa, Artificial Sequence
  source: /note="Description of Artificial Sequence: Synthetic peptide"
  source: /note="HER-2 / neu"
RLLQETELV

SEQ ID NO: 476 - protein, 9 aa, Artificial Sequence
  source: /note="Description of Artificial Sequence: Synthetic peptide"
  source: /note="HER-2 / neu"
VVLGVVFGI

SEQ ID NO: 477 - protein, 10 aa, Artificial Sequence
  source: /note="Description of Artificial Sequence: Synthetic peptide"
  source: /note="HER-2 / neu"
YMIMVKCWMI

SEQ ID NO: 478 - protein, 9 aa, Artificial Sequence
  source: /note="Description of Artificial Sequence: Synthetic peptide"
  source: /note="HER-2 / neu"
HLYQGCQVV

SEQ ID NO: 479 - protein, 10 aa, Artificial Sequence
  source: /note="Description of Artificial Sequence: Synthetic peptide"
  source: /note="HER-2 / neu"
YLVPQQGFFC

SEQ ID NO: 480 - protein, 9 aa, Artificial Sequence
  source: /note="Description of Artificial Sequence: Synthetic peptide"
  source: /note="HER-2 / neu"
PLQPEQLQV

SEQ ID NO: 481 - protein, 9 aa, Artificial Sequence
  source: /note="Description of Artificial Sequence: Synthetic peptide"
  source: /note="HER-2 / neu"
TLEEITGYL

SEQ ID NO: 482 - protein, 9 aa, Artificial Sequence
  source: /note="Description of Artificial Sequence: Synthetic peptide"
  source: /note="HER-2 / neu"
ALIHHNTHL

SEQ ID NO: 483 - protein, 9 aa, Artificial Sequence
  source: /note="Description of Artificial Sequence: Synthetic peptide"
  source: /note="HER-2 / neu"
PLTSIISAV

SEQ ID NO: 484 - protein, 9 aa, Artificial Sequence
  source: /note="Description of Artificial Sequence: Synthetic peptide"
  source: /note="HER-2 / neu"
VLRENTSPK

SEQ ID NO: 485 - protein, 9 aa, Artificial Sequence
  source: /note="Description of Artificial Sequence: Synthetic peptide"
  source: /note="HER-2 / neu"
TYLPTNASL

SEQ ID NO: 486 - protein, 9 aa, Artificial Sequence
  source: /note="Description of Artificial Sequence: Synthetic peptide"
  source: /note="HLA-DOB"
FLLGLIFLL

SEQ ID NO: 487 - protein, 9 aa, Artificial Sequence
  source: /note="Description of Artificial Sequence: Synthetic peptide"
  source: /note="Hepsin"
SLLSGDWVL

SEQ ID NO: 488 - protein, 9 aa, Artificial Sequence
  source: /note="Description of Artificial Sequence: Synthetic peptide"
  source: /note="Hepsin"
GLQLGVQAV

SEQ ID NO: 489 - protein, 9 aa, Artificial Sequence
  source: /note="Description of Artificial Sequence: Synthetic peptide"
  source: /note="Hepsin"
PLTEYIQPV

SEQ ID NO: 490 - protein, 9 aa, Artificial Sequence
  source: /note="Description of Artificial Sequence: Synthetic peptide"
  source: /note="IDO1"
ALLEIASCL

SEQ ID NO: 491 - protein, 9 aa, Artificial Sequence
  source: /note="Description of Artificial Sequence: Synthetic peptide"
  source: /note="IGF2B3"
NLSSAEVVV

SEQ ID NO: 492 - protein, 9 aa, Artificial Sequence
  source: /note="Description of Artificial Sequence: Synthetic peptide"
  source: /note="IGF2B3"
RLLVPTQFV

SEQ ID NO: 493 - protein, 9 aa, Artificial Sequence
  source: /note="Description of Artificial Sequence: Synthetic peptide"
  source: /note="IL13Ralpha2"
WLPFGFILI

SEQ ID NO: 494 - protein, 9 aa, Artificial Sequence
  source: /note="Description of Artificial Sequence: Synthetic peptide"
  source: /note="Intestinal carboxyl esterase"
SPRWWPTCL

SEQ ID NO: 495 - protein, 9 aa, Artificial Sequence
  source: /note="Description of Artificial Sequence: Synthetic peptide"
  source: /note="alpha-foetoprotein"
GVALQTMKQ

SEQ ID NO: 496 - protein, 9 aa, Artificial Sequence
  source: /note="Description of Artificial Sequence: Synthetic peptide"
  source: /note="alpha-foetoprotein"
FMNKFIYEI

SEQ ID NO: 497 - protein, 10 aa, Artificial Sequence
  source: /note="Description of Artificial Sequence: Synthetic peptide"
  source: /note="alpha-foetoprotein"
QLAVSVILRV

SEQ ID NO: 498 - protein, 9 aa, Artificial Sequence
  source: /note="Description of Artificial Sequence: Synthetic peptide"
  source: /note="Kallikrein 4"
FLGYLILGV

SEQ ID NO: 499 - protein, 15 aa, Artificial Sequence
  source: /note="Description of Artificial Sequence: Synthetic peptide"
  source: /note="Kallikrein 4"
SVSESDTIRSISIAS

SEQ ID NO: 500 - protein, 15 aa, Artificial Sequence
  source: /note="Description of Artificial Sequence: Synthetic peptide"
  source: /note="Kallikrein 4"
LLANGRMPTVLQCVN

SEQ ID NO: 501 - protein, 15 aa, Artificial Sequence
  source: /note="Description of Artificial Sequence: Synthetic peptide"
  source: /note="Kallikrein 4"
RMPTVLQCVNVSVVS

SEQ ID NO: 502 - protein, 9 aa, Artificial Sequence
  source: /note="Description of Artificial Sequence: Synthetic peptide"
  source: /note="KIF20A"
LLSDDDVVV

SEQ ID NO: 503 - protein, 10 aa, Artificial Sequence
  source: /note="Description of Artificial Sequence: Synthetic peptide"
  source: /note="KIF20A"
AQPDTAPLPV

SEQ ID NO: 504 - protein, 9 aa, Artificial Sequence
  source: /note="Description of Artificial Sequence: Synthetic peptide"
  source: /note="KIF20A"
CIAEQYHTV

SEQ ID NO: 505 - protein, 10 aa, Artificial Sequence
  source: /note="Description of Artificial Sequence: Synthetic peptide"
  source: /note="Lengsin"
FLPEFGISSA

SEQ ID NO: 506 - protein, 14 aa, Artificial Sequence
  source: /note="Description of Artificial Sequence: Synthetic peptide"
  source: /note="M-CSF"
LPAVVGLSPGEQEY

SEQ ID NO: 507 - protein, 16 aa, Artificial Sequence
  source: /note="Description of Artificial Sequence: Synthetic peptide"
  source: /note="MCSP"
VGQDVSVLFRVTGALQ

SEQ ID NO: 508 - protein, 8 aa, Artificial Sequence
  source: /note="Description of Artificial Sequence: Synthetic peptide"
  source: /note="mdm-2"
VLFYLGQY

SEQ ID NO: 509 - protein, 9 aa, Artificial Sequence
  source: /note="Description of Artificial Sequence: Synthetic peptide"
  source: /note="Meloe"
TLNDECWPA

SEQ ID NO: 510 - protein, 14 aa, Artificial Sequence
  source: /note="Description of Artificial Sequence: Synthetic peptide"
  source: /note="Meloe"
ERISSTLNDECWPA

SEQ ID NO: 511 - protein, 11 aa, Artificial Sequence
  source: /note="Description of Artificial Sequence: Synthetic peptide"
  source: /note="Meloe"
FGRLQGISPKI

SEQ ID NO: 512 - protein, 13 aa, Artificial Sequence
  source: /note="Description of Artificial Sequence: Synthetic peptide"
  source: /note="Meloe"
TSREQFLPSEGAA

SEQ ID NO: 513 - protein, 14 aa, Artificial Sequence
  source: /note="Description of Artificial Sequence: Synthetic peptide"
  source: /note="Meloe"
CPPWHPSERISSTL

SEQ ID NO: 514 - protein, 9 aa, Artificial Sequence
  source: /note="Description of Artificial Sequence: Synthetic peptide"
  source: /note="Midkine"
ALLALTSAV

SEQ ID NO: 515 - protein, 9 aa, Artificial Sequence
  source: /note="Description of Artificial Sequence: Synthetic peptide"
  source: /note="Midkine"
AQCQETIRV

SEQ ID NO: 516 - protein, 15 aa, Artificial Sequence
  source: /note="Description of Artificial Sequence: Synthetic peptide"
  source: /note="Midkine"
LTLLALLALTSAVAK

SEQ ID NO: 517 - protein, 10 aa, Artificial Sequence
  source: /note="Description of Artificial Sequence: Synthetic peptide"
  source: /note="MMP-2"
GLPPDVQRVH

SEQ ID NO: 518 - protein, 12 aa, Artificial Sequence
  source: /note="Description of Artificial Sequence: Synthetic peptide"
  source: /note="MMP-7"
SLFPNSPKWTSK

SEQ ID NO: 519 - protein, 9 aa, Artificial Sequence
  source: /note="Description of Artificial Sequence: Synthetic peptide"
  source: /note="MUC1"
STAPPVHNV

SEQ ID NO: 520 - protein, 9 aa, Artificial Sequence
  source: /note="Description of Artificial Sequence: Synthetic peptide"
  source: /note="MUC1"
LLLLTVLTV

SEQ ID NO: 521 - protein, 12 aa, Artificial Sequence
  source: /note="Description of Artificial Sequence: Synthetic peptide"
  source: /note="MUC1"
PGSTAPPAHGVT

SEQ ID NO: 522 - protein, 9 aa, Artificial Sequence
  source: /note="Description of Artificial Sequence: Synthetic peptide"
  source: /note="MUC5AC"
TCQPTCRSL

SEQ ID NO: 523 - protein, 9 aa, Artificial Sequence
  source: /note="Description of Artificial Sequence: Synthetic peptide"
  source: /note="p53"
LLGRNSFEV

SEQ ID NO: 524 - protein, 9 aa, Artificial Sequence
  source: /note="Description of Artificial Sequence: Synthetic peptide"
  source: /note="p53"
RMPEAAPPV

SEQ ID NO: 525 - protein, 9 aa, Artificial Sequence
  source: /note="Description of Artificial Sequence: Synthetic peptide"
  source: /note="p53"
SQKTYQGSY

SEQ ID NO: 526 - protein, 13 aa, Artificial Sequence
  source: /note="Description of Artificial Sequence: Synthetic peptide"
  source: /note="p53"
PGTRVRAMAIYKQ

SEQ ID NO: 527 - protein, 12 aa, Artificial Sequence
  source: /note="Description of Artificial Sequence: Synthetic peptide"
  source: /note="p53"
HLIRVEGNLRVE

SEQ ID NO: 528 - protein, 9 aa, Artificial Sequence
  source: /note="Description of Artificial Sequence: Synthetic peptide"
  source: /note="PAX5"
TLPGYPPHV

SEQ ID NO: 529 - protein, 12 aa, Artificial Sequence
  source: /note="Description of Artificial Sequence: Synthetic peptide"
  source: /note="PBF"
CTACRWKKACQR

SEQ ID NO: 530 - protein, 9 aa, Artificial Sequence
  source: /note="Description of Artificial Sequence: Synthetic peptide"
  source: /note="PRAME"
VLDGLDVLL

SEQ ID NO: 531 - protein, 10 aa, Artificial Sequence
  source: /note="Description of Artificial Sequence: Synthetic peptide"
  source: /note="PRAME"
SLYSFPEPEA

SEQ ID NO: 532 - protein, 10 aa, Artificial Sequence
  source: /note="Description of Artificial Sequence: Synthetic peptide"
  source: /note="PRAME"
ALYVDSLFFL

SEQ ID NO: 533 - protein, 9 aa, Artificial Sequence
  source: /note="Description of Artificial Sequence: Synthetic peptide"
  source: /note="PRAME"
SLLQHLIGL

SEQ ID NO: 534 - protein, 10 aa, Artificial Sequence
  source: /note="Description of Artificial Sequence: Synthetic peptide"
  source: /note="PRAME"
LYVDSLFFLC

SEQ ID NO: 535 - protein, 9 aa, Artificial Sequence
  source: /note="Description of Artificial Sequence: Synthetic peptide"
  source: /note="PSMA"
NYARTEDFF

SEQ ID NO: 536 - protein, 9 aa, Artificial Sequence
  source: /note="Description of Artificial Sequence: Synthetic peptide"
  source: /note="RAGE-1"
LKLSGVVRL

SEQ ID NO: 537 - protein, 11 aa, Artificial Sequence
  source: /note="Description of Artificial Sequence: Synthetic peptide"
  source: /note="RAGE-1"
PLPPARNGGLG

SEQ ID NO: 538 - protein, 10 aa, Artificial Sequence
  source: /note="Description of Artificial Sequence: Synthetic peptide"
  source: /note="RAGE-1"
SPSSNRIRNT

SEQ ID NO: 539 - protein, 9 aa, Artificial Sequence
  source: /note="Description of Artificial Sequence: Synthetic peptide"
  source: /note="RGS5"
LAALPHSCL

SEQ ID NO: 540 - protein, 10 aa, Artificial Sequence
  source: /note="Description of Artificial Sequence: Synthetic peptide"
  source: /note="RGS5"
GLASFKSFLK

SEQ ID NO: 541 - protein, 10 aa, Artificial Sequence
  source: /note="Description of Artificial Sequence: Synthetic peptide"
  source: /note="RhoC"
RAGLQVRKNK

SEQ ID NO: 542 - protein, 10 aa, Artificial Sequence
  source: /note="Description of Artificial Sequence: Synthetic peptide"
  source: /note="RNF43"
  VARIANT (10)..(10): /replace=" "
  MISC_FEATURE (1)..(10): /note="Variant residues given in the sequence have no preference with respect to those in the annotations for variant positions"
ALWPWLLMAT

SEQ ID NO: 543 - protein, 9 aa, Artificial Sequence
  source: /note="Description of Artificial Sequence: Synthetic peptide"
  source: /note="RNF43"
NSQPVWLCL

SEQ ID NO: 544 - protein, 9 aa, Artificial Sequence
  source: /note="Description of Artificial Sequence: Synthetic peptide"
  source: /note="RU2AS"
LPRWPPPQL

SEQ ID NO: 545 - protein, 9 aa, Artificial Sequence
  source: /note="Description of Artificial Sequence: Synthetic peptide"
  source: /note="secernin1"
KMDAEHPEL

SEQ ID NO: 546 - protein, 9 aa, Artificial Sequence
  source: /note="Description of Artificial Sequence: Synthetic peptide"
  source: /note="SOX10"
AWISKPPGV

SEQ ID NO: 547 - protein, 10 aa, Artificial Sequence
  source: /note="Description of Artificial Sequence: Synthetic peptide"
  source: /note="SOX10"
SAWISKPPGV

SEQ ID NO: 548 - protein, 9 aa, Artificial Sequence
  source: /note="Description of Artificial Sequence: Synthetic peptide"
  source: /note="STEAP1"
MIAVFLPIV

SEQ ID NO: 549 - protein, 15 aa, Artificial Sequence
  source: /note="Description of Artificial Sequence: Synthetic peptide"
  source: /note="STEAP1"
HQQYFYKIPILVINK

SEQ ID NO: 550 - protein, 10 aa, Artificial Sequence
  source: /note="Description of Artificial Sequence: Synthetic peptide"
  source: /note="survivin"
ELTLGEFLKL

SEQ ID NO: 551 - protein, 15 aa, Artificial Sequence
  source: /note="Description of Artificial Sequence: Synthetic peptide"
  source: /note="survivin"
TLGEFLKLDRERAKN

SEQ ID NO: 552 - protein, 10 aa, Artificial Sequence
  source: /note="Description of Artificial Sequence: Synthetic peptide"
  source: /note="Telomerase"
ILAKFLHWLE

SEQ ID NO: 553 - protein, 9 aa, Artificial Sequence
  source: /note="Description of Artificial Sequence: Synthetic peptide"
  source: /note="Telomerase"
RLVDDFLLV

SEQ ID NO: 554 - protein, 15 aa, Artificial Sequence
  source: /note="Description of Artificial Sequence: Synthetic peptide"
  source: /note="Telomerase"
RPGLLGASVLGLDDI

SEQ ID NO: 555 - protein, 15 aa, Artificial Sequence
  source: /note="Description of Artificial Sequence: Synthetic peptide"
  source: /note="Telomerase"
LTDLQPYMRQFVAHL

SEQ ID NO: 556 - protein, 9 aa, Artificial Sequence
  source: /note="Description of Artificial Sequence: Synthetic peptide"
  source: /note="TPBG"
RLARLALVL

SEQ ID NO: 557 - protein, 9 aa, Artificial Sequence
  source: /note="Description of Artificial Sequence: Synthetic peptide"
  source: /note="VEGF"
SRFGGAVVR

SEQ ID NO: 558 - protein, 11 aa, Artificial Sequence
  source: /note="Description of Artificial Sequence: Synthetic peptide"
  source: /note="WT1"
TSEKRPFMCAY

SEQ ID NO: 559 - protein, 9 aa, Artificial Sequence
  source: /note="Description of Artificial Sequence: Synthetic peptide"
  source: /note="WT1"
CMTWNQMNL

SEQ ID NO: 560 - protein, 11 aa, Artificial Sequence
  source: /note="Description of Artificial Sequence: Synthetic peptide"
  source: /note="WT1"
LSHLQMHSRKH

SEQ ID NO: 561 - protein, 16 aa, Artificial Sequence
  source: /note="Description of Artificial Sequence: Synthetic peptide"
  source: /note="WT1"
KRYFKLSHLQMHSRKH

SEQ ID NO: 562 - protein, 504 aa, Artificial Sequence
  source: /note="Description of Artificial Sequence: Synthetic polypeptide"
  source: /note="single chain variable fragment fusion protein"
DIQLTQSPASLAVSLGQRATISCKASQSVDYDGDSYLNWYQQIPGQPPKLLIYDASNLVSGIPPRFSGSGSGTDFTLNIHPVEKVDAATYHCQQSTEDPWTFGGGTKLEIKGGGGSGGGGSGGGGSQVQLQQSGAELVRPGSSVKISCKASGYAFSSYWMNWVKQRPGQGLEWIGQIWPGDGDTNYNGKFKGKATLTADESSSTAYMQLSSLASEDSAVYFCARRETTTVGRYYYAMDYWGQGTTVTVSSGGGGSDIKLQQSGAELARPGASVKMSCKTSGYTFTRYTMHWVKQRPGQGLEWIGYINPSRGYTNYNQKFKDKATLTTDKSSSTAYMQLSSLTSEDSAVYYCARYYDDHYCLDYWGQGTTLTVSSVEGGSGGSGGSGGSGGVDDIQLTQSPAIMSASPGEKVTMTCRASSSVSYMNWYQQKSGTSPKRWIYDTSKVASGVPYRFSGSGSGTSYSLTISSMEAEDAATYYCQQWSSNPLTFGAGTKLELKHHHHHH

SEQ ID NO: 563 - DNA, 290 bp, Artificial Sequence
  source: /note="Description of Artificial Sequence: Synthetic polynucleotide"
  source: /note="FNR Responsive Promoter"
gtcagcataacaccctgacctctcattaattgttcatgccgggcggcactatcgtcgtccggccttttcctctcttactctgctacgtacatctatttctataaatccgttcaatttgtctgttttttgcacaaacatgaaatatcagacaattccgtgacttaagaaaatttatacaaatcagcaatataccccttaaggagtatataaaggtgaatttgatttacatcaataagcggggttgctgaatcgttaaggtaggcggtaatagaaaagaaatcgaggcaaaa

SEQ ID NO: 564 - DNA, 173 bp, Artificial Sequence
  source: /note="Description of Artificial Sequence: Synthetic polynucleotide"
  source: /note="FNR Responsive Promoter"
atttcctctcatcccatccggggtgagagtcttttcccccgacttatggctcatgcatgcatcaaaaaagatgtgagcttgatcaaaaacaaaaaatatttcactcgacaggagtatttatattgcgcccgttacgtgggcttcgactgtaaatcagaaaggagaaaacacct

SEQ ID NO: 565 - DNA, 305 bp, Artificial Sequence
  source: /note="Description of Artificial Sequence: Synthetic polynucleotide"
  source: /note="FNR Responsive Promoter"
gtcagcataacaccctgacctctcattaattgttcatgccgggcggcactatcgtcgtccggccttttcctctcttactctgctacgtacatctatttctataaatccgttcaatttgtctgttttttgcacaaacatgaaatatcagacaattccgtgacttaagaaaatttatacaaatcagcaatataccccttaaggagtatataaaggtgaatttgatttacatcaataagcggggttgctgaatcgttaaggatccctctagaaataattttgtttaactttaagaaggagatatacat

SEQ ID NO: 566 - DNA, 180 bp, Artificial Sequence
  source: /note="Description of Artificial Sequence: Synthetic polynucleotide"
  source: /note="FNR Responsive Promoter"
catttcctctcatcccatccggggtgagagtcttttcccccgacttatggctcatgcatgcatcaaaaaagatgtgagcttgatcaaaaacaaaaaatatttcactcgacaggagtatttatattgcgcccggatccctctagaaataattttgtttaactttaagaaggagatatacat

SEQ ID NO: 567 - DNA, 199 bp, Artificial Sequence
  source: /note="Description of Artificial Sequence: Synthetic polynucleotide"
  source: /note="FNR Responsive Promoter"
agttgttcttattggtggtgttgctttatggttgcatcgtagtaaatggttgtaacaaaagcaatttttccggctgtctgtatacaaaaacgccgtaaagtttgagcgaagtcaataaactctctacccattcagggcaatatctctcttggatccctctagaaataattttgtttaactttaagaaggagatatacat

SEQ ID NO: 568 - DNA, 117 bp, Artificial Sequence
  source: /note="Description of Artificial Sequence: Synthetic polynucleotide"
  source: /note="FNR-responsive regulatory region"
atccccatcactcttgatggagatcaattccccaagctgctagagcgttaccttgcccttaaacattagcaatgtcgatttatcagagggccgacaggctcccacaggagaaaaccg

SEQ ID NO: 569 - DNA, 108 bp, Artificial Sequence
  source: /note="Description of Artificial Sequence: Synthetic polynucleotide"
  source: /note="FNR-responsive regulatory region"
ctcttgatcgttatcaattcccacgctgtttcagagcgttaccttgcccttaaacattagcaatgtcgatttatcagagggccgacaggctcccacaggagaaaaccg

SEQ ID NO: 570 - DNA, 290 bp, Artificial Sequence; identical to SEQ ID NO: 563
  source: /note="Description of Artificial Sequence: Synthetic polynucleotide"
  source: /note="nirB1 , FNR-responsive regulatory region"

SEQ ID NO: 571 - DNA, 433 bp, Artificial Sequence
  source: /note="Description of Artificial Sequence: Synthetic polynucleotide"
  source: /note="nirB2 , FNR-responsive regulatory region"
cggcccgatcgttgaacatagcggtccgcaggcggcactgcttacagcaaacggtctgtacgctgtcgtctttgtgatgtgcttcctgttaggtttcgtcagccgtcaccgtcagcataacaccctgacctctcattaattgctcatgccggacggcactatcgtcgtccggccttttcctctcttcccccgctacgtgcatctatttctataaacccgctcattttgtctattttttgcacaaacatgaaatatcagacaattccgtgacttaagaaaatttatacaaatcagcaatatacccattaaggagtatataaaggtgaatttgatttacatcaataagcggggttgctgaatcgttaaggtaggcggtaatagaaaagaaatcgaggcaaaaatgtttgtttaactttaagaaggagatatacat

SEQ ID NO: 572 - DNA, 290 bp, Artificial Sequence
  source: /note="Description of Artificial Sequence: Synthetic polynucleotide"
  source: /note="nirB3 , FNR-responsive regulatory region"
gtcagcataacaccctgacctctcattaattgctcatgccggacggcactatcgtcgtccggccttttcctctcttcccccgctacgtgcatctatttctataaacccgctcattttgtctattttttgcacaaacatgaaatatcagacaattccgtgacttaagaaaatttatacaaatcagcaatatacccattaaggagtatataaaggtgaatttgatttacatcaataagcggggttgctgaatcgttaaggtaggcggtaatagaaaagaaatcgaggcaaaa

SEQ ID NO: 573 - DNA, 173 bp, Artificial Sequence; identical to SEQ ID NO: 564
  source: /note="Description of Artificial Sequence: Synthetic polynucleotide"
  source: /note="ydfZ , FNR-responsive regulatory region"

SEQ ID NO: 574 - DNA, 305 bp, Artificial Sequence; identical to SEQ ID NO: 565
  source: /note="Description of Artificial Sequence: Synthetic polynucleotide"
  source: /note="nirB+RBS , FNR-responsive regulatory region"

SEQ ID NO: 575 - DNA, 180 bp, Artificial Sequence; identical to SEQ ID NO: 566
  source: /note="Description of Artificial Sequence: Synthetic polynucleotide"
  source: /note="ydfZ+RBS , FNR-responsive regulatory region"

SEQ ID NO: 576 - DNA, 199 bp, Artificial Sequence; identical to SEQ ID NO: 567
  source: /note="Description of Artificial Sequence: Synthetic polynucleotide"
  source: /note="FNRS1 , FNR-responsive regulatory region"

SEQ ID NO: 577 - DNA, 207 bp, Artificial Sequence
  source: /note="Description of Artificial Sequence: Synthetic polynucleotide"
  source: /note="FNRS2 , FNR-responsive regulatory region"
agttgttcttattggtggtgttgctttatggttgcatcgtagtaaatggttgtaacaaaagcaatttttccggctgtctgtatacaaaaacgccgcaaagtttgagcgaagtcaataaactctctacccattcagggcaatatctctcttggatccaaagtgaactctagaaataattttgtttaactttaagaaggagatatacat

SEQ ID NO: 578 - DNA, 390 bp, Artificial Sequence
  source: /note="Description of Artificial Sequence: Synthetic polynucleotide"
  source: /note="nirB+crp , FNR-responsive regulatory region"
tcgtctttgtgatgtgcttcctgttaggtttcgtcagccgtcaccgtcagcataacaccctgacctctcattaattgctcatgccggacggcactatcgtcgtccggccttttcctctcttcccccgctacgtgcatctatttctataaacccgctcattttgtctattttttgcacaaacatgaaatatcagacaattccgtgacttaagaaaatttatacaaatcagcaatatacccattaaggagtatataaaggtgaatttgatttacatcaataagcggggttgctgaatcgttaaggtagaaatgtgatctagttcacatttgcggtaatagaaaagaaatcgaggcaaaaatgtttgtttaactttaagaaggagatatacat

SEQ ID NO: 579 - DNA, 200 bp, Artificial Sequence
  source: /note="Description of Artificial Sequence: Synthetic polynucleotide"
  source: /note="FNRS+crp , FNR-responsive regulatory region"
agttgttcttattggtggtgttgctttatggttgcatcgtagtaaatggttgtaacaaaagcaatttttccggctgtctgtatacaaaaacgccgcaaagtttgagcgaagtcaataaactctctacccattcagggcaatatctctcaaatgtgatctagttcacattttttgtttaactttaagaaggagatatacat

SEQ ID NO: 580 - DNA, 355 bp, Artificial Sequence
  source: /note="Description of Artificial Sequence: Synthetic polynucleotide"
  source: /note="katG, Regulatory sequence"
tgtggcttttatgaaaatcacacagtgatcacaaattttaaacagagcacaaaatgctgcctcgaaatgagggcgggaaaataaggttatcagccttgttttctccctcattacttgaaggatatgaagctaaaacccttttttataaagcatttgtccgaattcggacataatcaaaaaagcttaattaagatcaatttgatctacatctctttaaccaacaatatgtaagatctcaactatcgcatccgtggattaattcaattataacttctctctaacgctgtgtatcgtaacggtaacactgtagaggggagcacattgatgcgaattcattaaagaggagaaaggtacc

SEQ ID NO: 581 - DNA, 228 bp, Artificial Sequence
  source: /note="Description of Artificial Sequence: Synthetic polynucleotide"
  source: /note="Dps, Regulatory sequence"
ttccgaaaattcctggcgagcagataaataagaattgttcttatcaatatatctaactcattgaatctttattagttttgtttttcacgcttgttaccactattagtgtgataggaacagccagaatagcggaacacatagccggtgctatacttaatctcgttaattactgggacataacatcaagaggatatgaaattcgaattcattaaagaggagaaaggtacc

SEQ ID NO: 582 - DNA, 334 bp, Artificial Sequence
  source: /note="Description of Artificial Sequence: Synthetic polynucleotide"
  source: /note="ahpC, Regulatory sequence"
gcttagatcaggtgattgccctttgtttatgagggtgttgtaatccatgtcgttgttgcatttgtaagggcaacacctcagcctgcaggcaggcactgaagataccaaagggtagttcagattacacggtcacctggaaagggggccattttactttttatcgccgctggcggtgcaaagttcacaaagttgtcttacgaaggttgtaaggtaaaacttatcgatttgataatggaaacgcattagccgaatcggcaaaaattggttaccttacatctcatcgaaaacacggaggaagtatagatgcgaattcattaaagaggagaaaggtacc

SEQ ID NO: 583 - DNA, 134 bp, Artificial Sequence
  source: /note="Description of Artificial Sequence: Synthetic polynucleotide"
  source: /note="oxyS Regulatory sequence"
ctcgagttcattatccatcctccatcgccacgatagttcatggcgataggtagaatagcaatgaacgattatccctatcaagcattctgactgataattgctcacacgaattcattaaagaggagaaaggtacc

SEQ ID NO: 584 - DNA, 1921 bp, Artificial Sequence
  source: /note="Description of Artificial Sequence: Synthetic polynucleotide"
  source: /note="Prp (Propionate)"
ttacccgtctggattttcagtacgcgcttttaaacgacgccacagcgtggtacggctgatccccaaataacgtgcggcggcgcgcttatcgccattaaagcgtgcgagcacctcctgcaatggaagcgcttctgctgacgagggcgtgatttctgctgtggtccccaccagttcaggtaataattgccgcataaattgtctgtccagtgttggtgcgggatcgacgcttaaaaaaagcgccaggcgttccatcatattccgcagttcgcgaatattaccgggccaatgatagttcagtagaagcggctgacactgcgtcagcccatgacgcaccgattcggtaaaagggatctccatcgcggccagcgattgttttaaaaagttttccgccagaggcagaatatcaggctgtcgctcgcgcaaggggggaagcggcagacgcagaatgctcaaacggtaaaacagatcggtacgaaaacgtccttgcgttatctcccgatccagatcgcaatgcgtggcgctgatcacccggacatctaccgggatcggctgatgcccgccaacgcgggtgacggctttttcctccagtacgcgtagaaggcgggtttgtaacggcagcggcatttcgccaatttcgtcaagaaacagcgtgccgccgtgggcgacctcaaacagccccgcacgtccacctcgtcttgagccggtaaacgctccctcctcatagccaaacagttcagcctccagcaacgactcggtaatcgcgccgcaattaacggcgacaaagggcggagaaggcttgttctgacggtggggctgacggttaaacaacgcctgatgaatcgcttgcgccgccagctctttcccggtccctgtttccccctgaatcagcactgccgcgcgggaacgggcatagagtgtaatcgtatggcgaacctgctccatttgtggtgaatcgccgaggatatcgctcagcgcataacgggtctgtaatcccttgctggaggtatgctggctatactgacgccgtgtcaggcgggtcatatccagcgcatcatggaaagcctgacgtacggtggccgctgaataaataaagatggcggtcattcctgcctcttccgccaggtcggtaattagtcctgccccaattacagcctcaatgccgttagctttgagctcgttaatttgcccgcgagcatcctcttcagtgatatagcttcgctgttcaagacggaggtgaaacgttttctgaaaggcgaccagagccggaatggtctcctgataggtcacgattcccattgaggaagtcagctttcccgcttttgccagagcctgtaatacatcgaatccgctgggtttgatgaggatgacaggtaccgacagtcggctttttaaataagcgccgttggaacctgccgcgataatcgcgtcgcagcgttcggttgccagttttttgcgaatgtaggctactgccttttcaaaaccgagctgaataggcgtgatcgtcgccagatgatcaaactccaggctgatatcccgaaatagttcgaacaggcgcgttaccgagaccgtccagatcaccggtttatcgctattatcgcgcgaagcgctatgcacagtaaccatcgtcgtagattcatgtttaaggaacgaattcttgttttatagatgtttcgttaatgttgcaatgaaacacaggcctccgtttcatgaaacgttagctgactcgtttttcttgtgactcgtctgtcagtattaaaaaagatttttcatttaactgattgtttttaaattgaattttatttaatggtttctcggtttttgggtctggcatatcccttgctttaatgagtgcatcttaattaacaattcaataacaagagggctgaatagtaatttcaacaaaataacgagcattcgaatg

SEQ ID NO: 585 - DNA, 305 bp, Artificial Sequence
  source: /note="Description of Artificial Sequence: Synthetic polynucleotide"
  source: /note="Arabinose Promoter region"
cagacattgccgtcactgcgtcttttactggctcttctcgctaacccaaccggtaaccccgcttattaaaagcattctgtaacaaagcgggaccaaagccatgacaaaaacgcgtaacaaaagtgtctataatcacggcagaaaagtccacattgattatttgcacggcgtcacactttgctatgccatagcatttttatccataagattagcggatccagcctgacgctttttttcgcaactctctactgtttctccatacctctagaaataattttgtttaactttaagaaggagatatacat

SEQ ID NO: 586 - DNA, 897 bp, Artificial Sequence
  source: /note="Description of Artificial Sequence: Synthetic polynucleotide"
  source: /note="AraC (reverse orientation)"
ttattcacaacctgccctaaactcgctcggactcgccccggtgcattttttaaatactcgcgagaaatagagttgatcgtcaaaaccgacattgcgaccgacggtggcgataggcatccgggtggtgctcaaaagcagcttcgcctgactgatgcgctggtcctcgcgccagcttaatacgctaatccctaactgctggcggaacaaatgcgacagacgcgacggcgacaggcagacatgctgtgcgacgctggcgatatcaaaattactgtctgccaggtgatcgctgatgtactgacaagcctcgcgtacccgattatccatcggtggatggagcgactcgttaatcgcttccatgcgccgcagtaacaattgctcaagcagatttatcgccagcaattccgaatagcgcccttccccttgtccggcattaatgatttgcccaaacaggtcgctgaaatgcggctggtgcgcttcatccgggcgaaagaaaccggtattggcaaatatcgacggccagttaagccattcatgccagtaggcgcgcggacgaaagtaaacccactggtgataccattcgtgagcctccggatgacgaccgtagtgatgaatctctccaggcgggaacagcaaaatatcacccggtcggcagacaaattctcgtccctgatttttcaccaccccctgaccgcgaatggtgagattgagaatataacctttcattcccagcggtcggtcgataaaaaaatcgagataaccgttggcctcaatcggcgttaaacccgccaccagatgggcgttaaacgagtatcccggcagcaggggatcattttgcgcttcagccatacttttcatactcccgccattcagagaagaaaccaattgtccatattgcat

SEQ ID NO: 587 - protein, 298 aa, Artificial Sequence
  source: /note="Description of Artificial Sequence: Synthetic polypeptide"
  source: /note="AraC polypeptide"
MQYGQLVSSLNGGSMKSMAEAQNDPLLPGYSFNAHLVAGLTPIEANGYLDFFIDRPLGMKGYILNLTIRGQGVVKNQGREFVCRPGDILLFPPGEIHHYGRHPEAHEWYHQWVYFRPRAYWHEWLNWPSIFANTGFFRPDEAHQPHFSDLFGQIINAGQGEGRYSELLAINLLEQLLLRRMEAINESLHPPMDNRVREACQYISDHLADSNFDIASVAQHVCLSPSRLSHLFRQQLGISVLSWREDQRISQAKLLLSTTRMPIATVGRNVGFDDQLYFSRVFKKCTGASPSEFRAGCE

SEQ ID NO: 588 - DNA, 280 bp, Artificial Sequence
  source: /note="Description of Artificial Sequence: Synthetic polynucleotide"
  source: /note="Region comprising rhamnose inducible promoter"
cggtgagcatcacatcaccacaattcagcaaattgtgaacatcatcacgttcatctttccctggttgccaatggcccattttcctgtcagtaacgagaaggtcgcgaatcaggcgctttttagactggtcgtaatgaaattcagctgtcaccggatgtgctttccggtctgatgagtccgtgaggacgaaacagcctctacaaataattttgtttaaaacaacacccactaagataactctagaaataattttgtttaactttaagaaggagatatacat

SEQ ID NO: 589 - DNA, 326 bp, Artificial Sequence
  source: /note="Description of Artificial Sequence: Synthetic polynucleotide"
  source: /note="Lac Promoter region"
attcaccaccctgaattgactctcttccgggcgctatcatgccataccgcgaaaggttttgcgccattcgatggcgcgccgcttcgtcaggccacatagctttcttgttctgatcggaacgatcgttggctgtgttgacaattaatcatcggctcgtataatgtgtggaattgtgagcgctcacaattagctgtcaccggatgtgctttccggtctgatgagtccgtgaggacgaaacagcctctacaaataattttgtttaaaacaacacccactaagataactctagaaataattttgtttaactttaagaaggagatatacat

SEQ ID NO: 590 - DNA, 1083 bp, Artificial Sequence
  source: /note="Description of Artificial Sequence: Synthetic polynucleotide"
  source: /note="LacI (in reverse orientation)"
tcactgcccgctttccagtcgggaaacctgtcgtgccagctgcattaatgaatcggccaacgcgcggggagaggcggtttgcgtattgggcgccagggtggtttttcttttcaccagtgagactggcaacagctgattgcccttcaccgcctggccctgagagagttgcagcaagcggtccacgctggtttgccccagcaggcgaaaatcctgtttgatggtggttaacggcgggatataacatgagctatcttcggtatcgtcgtatcccactaccgagatatccgcaccaacgcgcagcccggactcggtaatggcgcgcattgcgcccagcgccatctgatcgttggcaaccagcatcgcagtgggaacgatgccctcattcagcatttgcatggtttgttgaaaaccggacatggcactccagtcgccttcccgttccgctatcggctgaatttgattgcgagtgagatatttatgccagccagccagacgcagacgcgccgagacagaacttaatgggcccgctaacagcgcgatttgctggtgacccaatgcgaccagatgctccacgcccagtcgcgtaccgtcctcatgggagaaaataatactgttgatgggtgtctggtcagagacatcaagaaataacgccggaacattagtgcaggcagcttccacagcaatggcatcctggtcatccagcggatagttaatgatcagcccactgacgcgttgcgcgagaagattgtgcaccgccgctttacaggcttcgacgccgcttcgttctaccatcgacaccaccacgctggcacccagttgatcggcgcgagatttaatcgccgcgacaatttgcgacggcgcgtgcagggccagactggaggtggcaacgccaatcagcaacgactgtttgcccgccagttgttgtgccacgcggttgggaatgtaattcagctccgccatcgccgcttccactttttcccgcgttttcgcagaaacgtggctggcctggttcaccacgcgggaaacggtctgataagagacaccggcatactctgcgacatcgtataacgttactggtttcat

SEQ ID NO: 591 - protein, 360 aa, Artificial Sequence
  source: /note="Description of Artificial Sequence: Synthetic polypeptide"
  source: /note="LacI polypeptide sequence"
MKPVTLYDVAEYAGVSYQTVSRVVNQASHVSAKTREKVEAAMAELNYIPNRVAQQLAGKQSLLIGVATSSLALHAPSQIVAAIKSRADQLGASVVVSMVERSGVEACKAAVHNLLAQRVSGLIINYPLDDQDAIAVEAACTNVPALFLDVSDQTPINSIIFSHEDGTRLGVEHLVALGHQQIALLAGPLSSVSARLRLAGWHKYLTRNQIQPIAEREGDWSAMSGFQQTMQMLNEGIVPTAMLVANDQMALGAMRAITESGLRVGADISVVGYDDTEDSSCYIPPLTTIKQDFRLLGQTSVDRLLQLSQGQAVKGNQLLPVSLVKRKTTLAPNTQTASPRALADSLMQLARQVSRLESGQ

SEQ ID NO: 592 - DNA, 222 bp, Artificial Sequence
  source: /note="Description of Artificial Sequence: Synthetic polynucleotide"
  source: /note="Region comprising Temperature sensitive promoter"
acgttaaatctatcaccgcaagggataaatatctaacaccgtgcgtgttgactattttacctctggcggtgataatggttgcatagctgtcaccggatgtgctttccggtctgatgagtccgtgaggacgaaacagcctctacaaataattttgtttaaaacaacacccactaagataactctagaaataattttgtttaactttaagaaggagatatacat

SEQ ID NO: 593 - DNA, 714 bp, Artificial Sequence
  source: /note="Description of Artificial Sequence: Synthetic polynucleotide"
  source: /note="mutant cI857 repressor"
tcagccaaacgtctcttcaggccactgactagcgataactttccccacaacggaacaactctcattgcatgggatcattgggtactgtgggtttagtggttgtaaaaacacctgaccgctatccctgatcagtttcttgaaggtaaactcatcacccccaagtctggctatgcagaaatcacctggctcaacagcctgctcagggtcaacgagaattaacattccgtcaggaaagcttggcttggagcctgttggtgcggtcatggaattaccttcaacctcaagccagaatgcagaatcactggcttttttggttgtgcttacccatctctccgcatcacctttggtaaaggttctaagcttaggtgagaacatccctgcctgaacatgagaaaaaacagggtactcatactcacttctaagtgacggctgcatactaaccgcttcatacatctcgtagatttctctggcgattgaagggctaaattcttcaacgctaactttgagaatttttgtaagcaatgcggcgttataagcatttaatgcattgatgccattaaataaagcaccaacgcctgactgccccatccccatcttgtctgcgacagattcctgggataagccaagttcatttttctttttttcataaattgctttaaggcgacgtgcgtcctcaagctgctcttgtgttaatggtttcttttttgtgctcat

SEQ ID NO: 594 - DNA, 43 bp, Artificial Sequence
  source: /note="Description of Artificial Sequence: Synthetic oligonucleotide"
  source: /note="RBS and leader region"
ctctagaaataattttgtttaactttaagaaggagatatacat

SEQ ID NO: 595 - protein, 237 aa, Artificial Sequence
  source: /note="Description of Artificial Sequence: Synthetic polypeptide"
  source: /note="mutant cI857 repressor polypeptide sequence"
MSTKKKPLTQEQLEDARRLKAIYEKKKNELGLSQESVADKMGMGQSGVGALFNGINALNAYNAALLTKILKVSVEEFSPSIAREIYEMYEAVSMQPSLRSEYEYPVFSHVQAGMFSPKLRTFTKGDAERWVSTTKKASDSAFWLEVEGNSMTAPTGSKPSFPDGMLILVDPEQAVEPGDFCIARLGGDEFTFKKLIRDSGQVFLQPLNPQYPMIPCNESCSVVGKVIASQWPEETFG

SEQ ID NO: 596 - DNA, 748 bp, Artificial Sequence
  source: /note="Description of Artificial Sequence: Synthetic polynucleotide"
  source: /note="TetR-Tet promoter construct"
ttaagacccactttcacatttaagttgtttttctaatccgcatatgatcaattcaaggccgaataagaaggctggctctgcaccttggtgatcaaataattcgatagcttgtcgtaataatggcggcatactatcagtagtaggtgtttccctttcttctttagcgacttgatgctcttgatcttccaatacgcaacctaaagtaaaatgccccacagcgctgagtgcatataatgcattctctagtgaaaaaccttgttggcataaaaaggctaattgattttcgagagtttcatactgtttttctgtaggccgtgtacctaaatgtacttttgctccatcgcgatgacttagtaaagcacatctaaaacttttagcgttattacgtaaaaaatcttgccagctttccccttctaaagggcaaaagtgagtatggtgcctatctaacatctcaatggctaaggcgtcgagcaaagcccgcttattttttacatgccaatacaatgtaggctgctctacacctagcttctgggcgagtttacgggttgttaaaccttcgattccgacctcattaagcagctctaatgcgctgttaatcactttacttttatctaatctagacatcattaattcctaatttttgttgacactctatcattgatagagttattttaccactccctatcagtgatagagaaaagtgaactctagaaataattttgtttaactttaagaaggagatatacat

SEQ ID NO: 597 - DNA, 225 bp, Artificial Sequence
  source: /note="Description of Artificial Sequence: Synthetic polynucleotide"
  source: /note="PssB promoter"
tcacctttcccggattaaacgcttttttgcccggtggcatggtgctaccggcgatcacaaacggttaattatgacacaaattgacctgaatgaatatacagtattggaatgcattacccggagtgttgtgtaacaatgtctggccaggtttgtttcccggaaccgaggtcacaacatagtaaaagcgctattggtaatggtacaatcgcgcgtttacacttattc

SEQ ID NO: 598 - DNA, 30 bp, Artificial Sequence
  source: /note="Description of Artificial Sequence: Synthetic oligonucleotide"
  source: /note="BBa_I14018"
gtttatacataggcgagtactctgttatgg

SEQ ID NO: 599 - DNA, 30 bp, Artificial Sequence
  source: /note="Description of Artificial Sequence: Synthetic oligonucleotide"
  source: /note="BBa_I14033"
agaggttccaactttcaccataatgaaaca

SEQ ID NO: 600 - DNA, 30 bp, Artificial Sequence
  source: /note="Description of Artificial Sequence: Synthetic oligonucleotide"
  source: /note="BBa_I14034"
taaacaactaacggacaattctacctaaca

SEQ ID NO: 601 - DNA, 30 bp, Artificial Sequence
  source: /note="Description of Artificial Sequence: Synthetic oligonucleotide"
  source: /note="BBa_I732021"
acatcaagccaaattaaacaggattaacac

SEQ ID NO: 602 - DNA, 30 bp, Artificial Sequence
  source: /note="Description of Artificial Sequence: Synthetic oligonucleotide"
  source: /note="BBa_I742126"
gaggtaaaatagtcaacacgcacggtgtta

SEQ ID NO: 603 - DNA, 30 bp, Artificial Sequence
  source: /note="Description of Artificial Sequence: Synthetic oligonucleotide"
  source: /note="BBa_J01006"
caggccggaataactccctataatgcgcca

SEQ ID NO: 604 - DNA, 30 bp, Artificial Sequence
  source: /note="Description of Artificial Sequence: Synthetic oligonucleotide"
  source: /note="BBa_J23100"
ggctagctcagtcctaggtacagtgctagc

SEQ ID NO: 605 - DNA, 30 bp, Artificial Sequence
  source: /note="Description of Artificial Sequence: Synthetic oligonucleotide"
  source: /note="BBa_J23101"
agctagctcagtcctaggtattatgctagc

SEQ ID NO: 606 - DNA, 30 bp, Artificial Sequence
  source: /note="Description of Artificial Sequence: Synthetic oligonucleotide"
  source: /note="BBa_J23102"
agctagctcagtcctaggtactgtgctagc

SEQ ID NO: 607 - DNA, 30 bp, Artificial Sequence
  source: /note="Description of Artificial Sequence: Synthetic oligonucleotide"
  source: /note="BBa_J23103"
agctagctcagtcctagggattatgctagc

SEQ ID NO: 608 - DNA, 30 bp, Artificial Sequence
  source: /note="Description of Artificial Sequence: Synthetic oligonucleotide"
  source: /note="BBa_J23104"
agctagctcagtcctaggtattgtgctagc

SEQ ID NO: 609 - DNA, 30 bp, Artificial Sequence
  source: /note="Description of Artificial Sequence: Synthetic oligonucleotide"
  source: /note="BBa_J23105"
ggctagctcagtcctaggtactatgctagc

SEQ ID NO: 610 - DNA, 30 bp, Artificial Sequence
  source: /note="Description of Artificial Sequence: Synthetic oligonucleotide"
  source: /note="BBa_J23106"
ggctagctcagtcctaggtatagtgctagc

SEQ ID NO: 611 - DNA, 30 bp, Artificial Sequence
  source: /note="Description of Artificial Sequence: Synthetic oligonucleotide"
  source: /note="BBa_J23107"
ggctagctcagccctaggtattatgctagc

SEQ ID NO: 612 - DNA, 30 bp, Artificial Sequence
  source: /note="Description of Artificial Sequence: Synthetic oligonucleotide"
  source: /note="BBa_J23108"
agctagctcagtcctaggtataatgctagc

SEQ ID NO: 613 - DNA, 30 bp, Artificial Sequence
  source: /note="Description of Artificial Sequence: Synthetic oligonucleotide"
  source: /note="BBa_J23109"
agctagctcagtcctagggactgtgctagc

SEQ ID NO: 614 - DNA, 30 bp, Artificial Sequence
  source: /note="Description of Artificial Sequence: Synthetic oligonucleotide"
  source: /note="BBa_J23110"
ggctagctcagtcctaggtacaatgctagc

SEQ ID NO: 615 - DNA, 30 bp, Artificial Sequence; identical to SEQ ID NO: 610
  source: /note="Description of Artificial Sequence: Synthetic oligonucleotide"
  source: /note="BBa_J23111"

SEQ ID NO: 616 - DNA, 30 bp, Artificial Sequence; identical to SEQ ID NO: 607
  source: /note="Description of Artificial Sequence: Synthetic oligonucleotide"
  source: /note="BBa_J23112"

SEQ ID NO: 617 - DNA, 30 bp, Artificial Sequence
  source: /note="Description of Artificial Sequence: Synthetic oligonucleotide"
  source: /note="BBa_J23113"
ggctagctcagtcctagggattatgctagc

SEQ ID NO: 618 - DNA, 30 bp, Artificial Sequence; identical to SEQ ID NO: 614
  source: /note="Description of Artificial Sequence: Synthetic oligonucleotide"
  source: /note="BBa_J23114"

SEQ ID NO: 619 - DNA, 30 bp, Artificial Sequence
  source: /note="Description of Artificial Sequence: Synthetic oligonucleotide"
  source: /note="BBa_J23115"
agctagctcagcccttggtacaatgctagc

SEQ ID NO: 620 - DNA, 30 bp, Artificial Sequence
  source: /note="Description of Artificial Sequence: Synthetic oligonucleotide"
  source: /note="BBa_J23116"
agctagctcagtcctagggactatgctagc

SEQ ID NO: 621 - DNA, 30 bp, Artificial Sequence
  source: /note="Description of Artificial Sequence: Synthetic oligonucleotide"
  source: /note="BBa_J23117"
agctagctcagtcctagggattgtgctagc

SEQ ID NO: 622 - DNA, 30 bp, Artificial Sequence
  source: /note="Description of Artificial Sequence: Synthetic oligonucleotide"
  source: /note="BBa_J23118"
ggctagctcagtcctaggtattgtgctagc

SEQ ID NO: 623 - DNA, 30 bp, Artificial Sequence; identical to SEQ ID NO: 612
  source: /note="Description of Artificial Sequence: Synthetic oligonucleotide"
  source: /note="BBa_J23119"

SEQ ID NO: 624 - DNA, 30 bp, Artificial Sequence
  source: /note="Description of Artificial Sequence: Synthetic oligonucleotide"
  source: /note="BBa_J23150"
ggctagctcagtcctaggtattatgctagc

SEQ ID NO: 625 - DNA, 30 bp, Artificial Sequence; identical to SEQ ID NO: 614
  source: /note="Description of Artificial Sequence: Synthetic oligonucleotide"
  source: /note="BBa_J23151"

SEQ ID NO: 626 - DNA, 30 bp, Artificial Sequence
  source: /note="Description of Artificial Sequence: Synthetic oligonucleotide"
  source: /note="BBa_J44002"
aaagtgtgacgccgtgcaaataatcaatgt

SEQ ID NO: 627 - DNA, 30 bp, Artificial Sequence
  source: /note="Description of Artificial Sequence: Synthetic oligonucleotide"
  source: /note="BBa_J48104"
gacgaatacttaaaatcgtcatacttattt

SEQ ID NO: 628 - DNA, 30 bp, Artificial Sequence
  source: /note="Description of Artificial Sequence: Synthetic oligonucleotide"
  source: /note="BBa_J54200"
aaacctttcgcggtatggcatgatagcgcc

SEQ ID NO: 629 - DNA, 30 bp, Artificial Sequence
  source: /note="Description of Artificial Sequence: Synthetic oligonucleotide"
  source: /note="BBa_J56015"
tgatagcgcccggaagagagtcaattcagg

SEQ ID NO: 630 - DNA, 30 bp, Artificial Sequence
  source: /note="Description of Artificial Sequence: Synthetic oligonucleotide"
  source: /note="BBa_J64951"
ttatttaccgtgacgaactaattgctcgtg

SEQ ID NO: 631 - DNA, 30 bp, Artificial Sequence
  source: /note="Description of Artificial Sequence: Synthetic oligonucleotide"
  source: /note="BBa_K088007"
catacgccgttatacgttgtttacgctttg

SEQ ID NO: 632 - DNA, 30 bp, Artificial Sequence
  source: /note="Description of Artificial Sequence: Synthetic oligonucleotide"
  source: /note="BBa_K119000"
ttatgcttccggctcgtatgttgtgtggac

SEQ ID NO: 633 - DNA, 30 bp, Artificial Sequence
  source: /note="Description of Artificial Sequence: Synthetic oligonucleotide"
  source: /note="BBa_K119001"
ttatgcttccggctcgtatggtgtgtggac

SEQ ID NO: 634 - DNA, 30 bp, Artificial Sequence; identical to SEQ ID NO: 609
  source: /note="Description of Artificial Sequence: Synthetic oligonucleotide"
  source: /note="BBa_K1330002"

SEQ ID NO: 635 - DNA, 30 bp, Artificial Sequence
  source: /note="Description of Artificial Sequence: Synthetic oligonucleotide"
  source: /note="BBa_K137029"
atatatatatatatataatggaagcgtttt

SEQ ID NO: 636 - DNA, 30 bp, Artificial Sequence; identical to SEQ ID NO: 635
  source: /note="Description of Artificial Sequence: Synthetic oligonucleotide"
  source: /note="BBa_K137030"

SEQ ID NO: 637 - DNA, 30 bp, Artificial Sequence
  source: /note="Description of Artificial Sequence: Synthetic oligonucleotide"
  source: /note="BBa_K137031"
ccccgaaagcttaagaatataattgtaagc

SEQ ID NO: 638 - DNA, 30 bp, Artificial Sequence; identical to SEQ ID NO: 637
  source: /note="Description of Artificial Sequence: Synthetic oligonucleotide"
  source: /note="BBa_K137032"

SEQ ID NO: 639 - DNA, 30 bp, Artificial Sequence
  source: /note="Description of Artificial Sequence: Synthetic oligonucleotide"
  source: /note="BBa_K137085"
tgacaatatatatatatatataatgctagc

SEQ ID NO: 640 - DNA, 30 bp, Artificial Sequence
  source: /note="Description of Artificial Sequence: Synthetic oligonucleotide"
  source: /note="BBa_K137086"
acaatatatatatatatatataatgctagc

SEQ ID NO: 641 - DNA, 30 bp, Artificial Sequence
  source: /note="Description of Artificial Sequence: Synthetic oligonucleotide"
  source: /note="BBa_K137087"
aatatatatatatatatatataatgctagc

SEQ ID NO: 642 - DNA, 30 bp, Artificial Sequence
  source: /note="Description of Artificial Sequence: Synthetic oligonucleotide"
  source: /note="BBa_K137088"
tatatatatatatatatatataatgctagc

SEQ ID NO: 643 - DNA, 30 bp, Artificial Sequence; identical to SEQ ID NO: 642
  source: /note="Description of Artificial Sequence: Synthetic oligonucleotide"
  source: /note="BBa_K137089"

SEQ ID NO: 644 - DNA, 30 bp, Artificial Sequence
  source: /note="Description of Artificial Sequence: Synthetic oligonucleotide"
  source: /note="BBa_K137090"
aaaaaaaaaaaaaaaaaatataatgctagc

SEQ ID NO: 645 - DNA, 30 bp, Artificial Sequence; identical to SEQ ID NO: 644
  source: /note="Description of Artificial Sequence: Synthetic oligonucleotide"
  source: /note="BBa_K137091"

SEQ ID NO: 646 - DNA, 30 bp, Artificial Sequence
  source: /note="Description of Artificial Sequence: Synthetic oligonucleotide"
  source: /note="BBa_K1585100"
ggaattgtgagcggataacaatttcacaca

SEQ ID NO: 647 - DNA, 30 bp, Artificial Sequence; identical to SEQ ID NO: 646
  source: /note="Description of Artificial Sequence: Synthetic oligonucleotide"
  source: /note="BBa_K1585101"

SEQ ID NO: 648 - DNA, 30 bp, Artificial Sequence; identical to SEQ ID NO: 646
  source: /note="Description of Artificial Sequence: Synthetic oligonucleotide"
  source: /note="BBa_K1585102"

SEQ ID NO: 649 - DNA, 30 bp, Artificial Sequence; identical to SEQ ID NO: 646
  source: /note="Description of Artificial Sequence: Synthetic oligonucleotide"
  source: /note="BBa_K1585103"

SEQ ID NO: 650 - DNA, 30 bp, Artificial Sequence; identical to SEQ ID NO: 646
  source: /note="Description of Artificial Sequence: Synthetic oligonucleotide"
  source: /note="BBa_K1585104"

SEQ ID NO: 651 - DNA, 30 bp, Artificial Sequence; identical to SEQ ID NO: 646
  source: /note="Description of Artificial Sequence: Synthetic oligonucleotide"
  source: /note="BBa_K1585105"

SEQ ID NO: 652 - DNA, 30 bp, Artificial Sequence; identical to SEQ ID NO: 646
  source: /note="Description of Artificial Sequence: Synthetic oligonucleotide"
  source: /note="BBa_K1585106"

SEQ ID NO: 653 - DNA, 30 bp, Artificial Sequence; identical to SEQ ID NO: 646
  source: /note="Description of Artificial Sequence: Synthetic oligonucleotide"
  source: /note="BBa_K1585110"

SEQ ID NO: 654 - DNA, 30 bp, Artificial Sequence; identical to SEQ ID NO: 646
  source: /note="Description of Artificial Sequence: Synthetic oligonucleotide"
  source: /note="BBa_K1585113"

SEQ ID NO: 655 - DNA, 30 bp, Artificial Sequence; identical to SEQ ID NO: 646
  source: /note="Description of Artificial Sequence: Synthetic oligonucleotide"
  source: /note="BBa_K1585115"

SEQ ID NO: 656 - DNA, 30 bp, Artificial Sequence; identical to SEQ ID NO: 646
  source: /note="Description of Artificial Sequence: Synthetic oligonucleotide"
  source: /note="BBa_K1585116"

SEQ ID NO: 657 - DNA, 30 bp, Artificial Sequence; identical to SEQ ID NO: 646
  source: /note="Description of Artificial Sequence: Synthetic oligonucleotide"
  source: /note="BBa_K1585117"

SEQ ID NO: 658 - DNA, 30 bp, Artificial Sequence; identical to SEQ ID NO: 646
  source: /note="Description of Artificial Sequence: Synthetic oligonucleotide"
  source: /note="BBa_K1585118"

SEQ ID NO: 659 - DNA, 30 bp, Artificial Sequence; identical to SEQ ID NO: 646
  source: /note="Description of Artificial Sequence: Synthetic oligonucleotide"
  source: /note="BBa_K1585119"

SEQ ID NO: 660 - DNA, 30 bp, Artificial Sequence
  source: /note="Description of Artificial Sequence: Synthetic oligonucleotide"
  source: /note="BBa_K1824896"
gattaaagaggagaaatactagagtactag

SEQ ID NO: 661 - DNA, 30 bp, Artificial Sequence
  source: /note="Description of Artificial Sequence: Synthetic oligonucleotide"
  source: /note="BBa_K256002"
caccttcgggtgggcctttctgcgtttata

SEQ ID NO: 662 - DNA, 30 bp, Artificial Sequence; identical to SEQ ID NO: 661
  source: /note="Description of Artificial Sequence: Synthetic oligonucleotide"
  source: /note="BBa_K256018"

SEQ ID NO: 663 - DNA, 30 bp, Artificial Sequence; identical to SEQ ID NO: 661
  source: /note="Description of Artificial Sequence: Synthetic oligonucleotide"
  source: /note="BBa_K256020"

SEQ ID NO: 664 - DNA, 30 bp, Artificial Sequence; identical to SEQ ID NO: 661
  source: /note="Description of Artificial Sequence: Synthetic oligonucleotide"
  source: /note="BBa_K256033"

SEQ ID NO: 665 - DNA, 30 bp, Artificial Sequence; identical to SEQ ID NO: 604
  source: /note="Description of Artificial Sequence: Synthetic oligonucleotide"
  source: /note="BBa_K292000"

SEQ ID NO: 666 - DNA, 30 bp, Artificial Sequence
  source: /note="Description of Artificial Sequence: Synthetic oligonucleotide"
  source: /note="BBa_K292001"
tgctagctactagagattaaagaggagaaa

SEQ ID NO: 667 - DNA, 30 bp, Artificial Sequence
  source: /note="Description of Artificial Sequence: Synthetic oligonucleotide"
  source: /note="BBa_K418000"
ttgtgagcggataacaagatactgagcaca

SEQ ID NO: 668 - DNA, 30 bp, Artificial Sequence; identical to SEQ ID NO: 667
  source: /note="Description of Artificial Sequence: Synthetic oligonucleotide"
  source: /note="BBa_K418002"

SEQ ID NO: 669 - DNA, 30 bp, Artificial Sequence; identical to SEQ ID NO: 667
  source: /note="Description of Artificial Sequence: Synthetic oligonucleotide"
  source: /note="BBa_K418003"

SEQ ID NO: 670 - DNA, 30 bp, Artificial Sequence; identical to SEQ ID NO: 604
  source: /note="Description of Artificial Sequence: Synthetic oligonucleotide"
  source: /note="BBa_K823004"

SEQ ID NO: 671 - DNA, 30 bp, Artificial Sequence; identical to SEQ ID NO: 605
  source: /note="Description of Artificial Sequence: Synthetic oligonucleotide"
  source: /note="BBa_K823005"

SEQ ID NO: 672 - DNA, 30 bp, Artificial Sequence; identical to SEQ ID NO: 606
  source: /note="Description of Artificial Sequence: Synthetic oligonucleotide"
  source: /note="BBa_K823006"

SEQ ID NO: 673 - DNA, 30 bp, Artificial Sequence; identical to SEQ ID NO: 607
  source: /note="Description of Artificial Sequence: Synthetic oligonucleotide"
  source: /note="BBa_K823007"

SEQ ID NO: 674 - DNA, 30 bp, Artificial Sequence; identical to SEQ ID NO: 610
  source: /note="Description of Artificial Sequence: Synthetic oligonucleotide"
  source: /note="BBa_K823008"

SEQ ID NO: 675 - DNA, 30 bp, Artificial Sequence; identical to SEQ ID NO: 617
  source: /note="Description of Artificial Sequence: Synthetic oligonucleotide"
  source: /note="BBa_K823010"

SEQ ID NO: 676 - DNA, 30 bp, Artificial Sequence; identical to SEQ ID NO: 614
  source: /note="Description of Artificial Sequence: Synthetic oligonucleotide"
  source: /note="BBa_K823011"

SEQ ID NO: 677 - DNA, 30 bp, Artificial Sequence; identical to SEQ ID NO: 621
  source: /note="Description of Artificial Sequence: Synthetic oligonucleotide"
  source: /note="BBa_K823013"

SEQ ID NO: 678 - DNA, 30 bp, Artificial Sequence; identical to SEQ ID NO: 622
  source: /note="Description of Artificial Sequence: Synthetic oligonucleotide"
  source: /note="BBa_K823014"

SEQ ID NO: 679 - DNA, 30 bp, Artificial Sequence
  source: /note="Description of Artificial Sequence: Synthetic oligonucleotide"
  source: /note="BBa_M13101"
cctgtttttatgttattctctctgtaaagg

SEQ ID NO: 680 - DNA, 30 bp, Artificial Sequence
  source: /note="Description of Artificial Sequence: Synthetic oligonucleotide"
  source: /note="BBa_M13102"
aaatatttgcttatacaatcttcctgtttt

SEQ ID NO: 681 - DNA, 30 bp, Artificial Sequence
  source: /note="Description of Artificial Sequence: Synthetic oligonucleotide"
  source: /note="BBa_M13103"
gctgataaaccgatacaattaaaggctcct

SEQ ID NO: 682 - DNA, 30 bp, Artificial Sequence
  source: /note="Description of Artificial Sequence: Synthetic oligonucleotide"
  source: /note="BBa_M13104"
ctcttctcagcgtcttaatctaagctatcg

SEQ ID NO: 683 - DNA, 30 bp, Artificial Sequence
  source: /note="Description of Artificial Sequence: Synthetic oligonucleotide"
  source: /note="BBa_M13105"
atgagccagttcttaaaatcgcataaggta

SEQ ID NO: 684 - DNA, 30 bp, Artificial Sequence
  source: /note="Description of Artificial Sequence: Synthetic oligonucleotide"
  source: /note="BBa_M13106"
ctattgattgtgacaaaataaacttattcc

SEQ ID NO: 685 - DNA, 30 bp, Artificial Sequence
  source: /note="Description of Artificial Sequence: Synthetic oligonucleotide"
  source: /note="BBa_M13108"
gtttcgcgcttggtataatcgctgggggtc

SEQ ID NO: 686 - DNA, 30 bp, Artificial Sequence
  source: /note="Description of Artificial Sequence: Synthetic oligonucleotide"
  source: /note="BBa_M13110"
ctttgcttctgactataatagtcagggtaa

SEQ ID NO: 687 - DNA, 30 bp, Artificial Sequence
  source: /note="Description of Artificial Sequence: Synthetic oligonucleotide"
  source: /note="BBa_M31519"
aaaccgatacaattaaaggctcctgctagc

SEQ ID NO: 688 - DNA, 30 bp, Artificial Sequence
  source: /note="Description of Artificial Sequence: Synthetic oligonucleotide"
  source: /note="BBa_R1074"
caccacactgatagtgctagtgtagatcac

SEQ ID NO: 689 - DNA, 30 bp, Artificial Sequence
  source: /note="Description of Artificial Sequence: Synthetic oligonucleotide"
  source: /note="BBa_R1075"
gccggaataactccctataatgcgccacca

SEQ ID NO: 690 - DNA, 30 bp, Artificial Sequence
  source: /note="Description of Artificial Sequence: Synthetic oligonucleotide"
  source: /note="BBa_S03331"
ttgacaagcttttcctcagctccgtaaact

SEQ ID NO: 691 - DNA, 30 bp, Artificial Sequence
  source: /note="Description of Artificial Sequence: Synthetic oligonucleotide"
  source: /note="BBa_J45992"
ggtttcaaaattgtgatctatatttaacaa

SEQ ID NO: 692 - DNA, 30 bp, Artificial Sequence; identical to SEQ ID NO: 691
  source: /note="Description of Artificial Sequence: Synthetic oligonucleotide"
  source: /note="BBa_J45993"

SEQ ID NO: 693 - DNA, 30 bp, Artificial Sequence
  source: /note="Description of Artificial Sequence: Synthetic oligonucleotide"
  source: /note="BBa_J45504"
tctattccaataaagaaatcttcctgcgtg

SEQ ID NO: 694 - DNA, 30 bp, Artificial Sequence
  source: /note="Description of Artificial Sequence: Synthetic oligonucleotide"
  source: /note="BBa_K1895002"
gaccgaatatatagtggaaacgtttagatg

SEQ ID NO: 695 - DNA, 30 bp, Artificial Sequence
  source: /note="Description of Artificial Sequence: Synthetic oligonucleotide"
  source: /note="BBa_K1895003"
ccacatcctgtttttaaccttaaaatggca

SEQ ID NO: 696 - DNA, 30 bp, Artificial Sequence
  source: /note="Description of Artificial Sequence: Synthetic oligonucleotide"
  source: /note="BBa_K143012"
aaaaatgggctcgtgttgtacaataaatgt

SEQ ID NO: 697 - DNA, 30 bp, Artificial Sequence
  source: /note="Description of Artificial Sequence: Synthetic oligonucleotide"
  source: /note="BBa_K143013"
aaaaaaagcgcgcgattatgtaaaatataa

SEQ ID NO: 698 - DNA, 30 bp, Artificial Sequence
  source: /note="Description of Artificial Sequence: Synthetic oligonucleotide"
  source: /note="BBa_K780003"
aattgcagtaggcatgacaaaatggactca

SEQ ID NO: 699 - DNA, 30 bp, Artificial Sequence
  source: /note="Description of Artificial Sequence: Synthetic oligonucleotide"
  source: /note="BBa_K823000"
caagcttttcctttataatagaatgaatga

SEQ ID NO: 700 - DNA, 30 bp, Artificial Sequence
  source: /note="Description of Artificial Sequence: Synthetic oligonucleotide"
  source: /note="BBa_K823002"
tctaagctagtgtattttgcgtttaatagt

SEQ ID NO: 701 - DNA, 30 bp, Artificial Sequence
  source: /note="Description of Artificial Sequence: Synthetic oligonucleotide"
  source: /note="BBa_K823003"
aatgggctcgtgttgtacaataaatgtagt

SEQ ID NO: 702 - DNA, 30 bp, Artificial Sequence
  source: /note="Description of Artificial Sequence: Synthetic oligonucleotide"
  source: /note="BBa_K143010"
atccttatcgttatgggtattgtttgtaat

SEQ ID NO: 703 - DNA, 30 bp, Artificial Sequence
  source: /note="Description of Artificial Sequence: Synthetic oligonucleotide"
  source: /note="BBa_K143011"
taaaagaattgtgagcgggaatacaacaac

SEQ ID NO: 704 - DNA, 30 bp, Artificial Sequence; identical to SEQ ID NO: 697
  source: /note="Description of Artificial Sequence: Synthetic oligonucleotide"
  source: /note="BBa_K143013"

SEQ ID NO: 705 - DNA, 30 bp, Artificial Sequence
  source: /note="Description of Artificial Sequence: Synthetic oligonucleotide"
  source: /note="BBa_K112706"
tacaaaataattcccctgcaaacattatca

SEQ ID NO: 706 - DNA, 30 bp, Artificial Sequence
  source: /note="Description of Artificial Sequence: Synthetic oligonucleotide"
  source: /note="BBa_K112707"
tacaaaataattcccctgcaaacattatcg

SEQ ID NO: 707 - DNA, 30 bp, Artificial Sequence
  source: /note="Description of Artificial Sequence: Synthetic oligonucleotide"
  source: /note="BBa_I712074"
agggaatacaagctacttgttctttttgca

SEQ ID NO: 708 - DNA, 23 bp, Artificial Sequence
  source: /note="Description of Artificial Sequence: Synthetic oligonucleotide"
  source: /note="BBa_I719005"
taatacgactcactatagggaga

SEQ ID NO: 709 - DNA, 28 bp, Artificial Sequence
  source: /note="Description of Artificial Sequence: Synthetic oligonucleotide"
  source: /note="BBa_J34814"
gaatttaatacgactcactatagggaga

SEQ ID NO: 710 - DNA, 19 bp, Artificial Sequence
  source: /note="Description of Artificial Sequence: Synthetic oligonucleotide"
  source: /note="BBa_J64997"
taatacgactcactatagg

SEQ ID NO: 711 - DNA, 30 bp, Artificial Sequence
  source: /note="Description of Artificial Sequence: Synthetic oligonucleotide"
  source: /note="BBa_K113010"
gagtcgtattaatacgactcactatagggg

SEQ ID NO: 712 - DNA, 30 bp, Artificial Sequence
  source: /note="Description of Artificial Sequence: Synthetic oligonucleotide"
  source: /note="BBa_K113011"
agtgagtcgtactacgactcactatagggg

SEQ ID NO: 713 - DNA, 30 bp, Artificial Sequence
  source: /note="Description of Artificial Sequence: Synthetic oligonucleotide"
  source: /note="BBa_K113012"
gagtcgtattaatacgactctctatagggg

SEQ ID NO: 714 - DNA, 18 bp, Artificial Sequence
  source: /note="Description of Artificial Sequence: Synthetic oligonucleotide"
  source: /note="BBa_K1614000"
taatacgactcactatag

SEQ ID NO: 715 - DNA, 23 bp, Artificial Sequence
  source: /note="Description of Artificial Sequence: Synthetic oligonucleotide"
  source: /note="BBa_R0085"
taatacgactcactatagggaga

SEQ ID NO: 716 - DNA, 23 bp, Artificial Sequence
  source: /note="Description of Artificial Sequence: Synthetic oligonucleotide"
  source: /note="BBa_R0180"
ttatacgactcactatagggaga

SEQ ID NO: 717 - DNA, 23 bp, Artificial Sequence
  source: /note="Description of Artificial Sequence: Synthetic oligonucleotide"
  source: /note="BBa_R0181"
gaatacgactcactatagggaga

SEQ ID NO: 718 - DNA, 23 bp, Artificial Sequence
  source: /note="Description of Artificial Sequence: Synthetic oligonucleotide"
  source: /note="BBa_R0182"
taatacgtctcactatagggaga

SEQ ID NO: 719 - DNA, 23 bp, Artificial Sequence
  source: /note="Description of Artificial Sequence: Synthetic oligonucleotide"
  source: /note="BBa_R0183"
tcatacgactcactatagggaga

SEQ ID NO: 720 - DNA, 30 bp, Artificial Sequence
  source: /note="Description of Artificial Sequence: Synthetic oligonucleotide"
  source: /note="BBa_Z0251"
taatacgactcactatagggagaccacaac

SEQ ID NO: 721 - DNA, 30 bp, Artificial Sequence
  source: /note="Description of Artificial Sequence: Synthetic oligonucleotide"
  source: /note="BBa_Z0252"
taattgaactcactaaagggagaccacagc

SEQ ID NO: 722 - DNA, 30 bp, Artificial Sequence
  source: /note="Description of Artificial Sequence: Synthetic oligonucleotide"
  source: /note="BBa_Z0253"
cgaagtaatacgactcactattagggaaga

SEQ ID NO: 723 - DNA, 19 bp, Artificial Sequence
  source: /note="Description of Artificial Sequence: Synthetic oligonucleotide"
atttaggtgacactataga

SEQ ID NO: 724 - DNA, 30 bp, Artificial Sequence
  source: /note="Description of Artificial Sequence: Synthetic oligonucleotide"
  source: /note="BBa_I766555"
acaaacacaaatacacacactaaattaata

SEQ ID NO: 725 - DNA, 30 bp, Artificial Sequence
  source: /note="Description of Artificial Sequence: Synthetic oligonucleotide"
  source: /note="BBa_I766556"
ccaagcatacaatcaactatctcatataca

SEQ ID NO: 726 - DNA, 30 bp, Artificial Sequence
  source: /note="Description of Artificial Sequence: Synthetic oligonucleotide"
  source: /note="BBa_I766557"
gatacaggatacagcggaaacaacttttaa

SEQ ID NO: 727 - DNA, 30 bp, Artificial Sequence
  source: /note="Description of Artificial Sequence: Synthetic oligonucleotide"
  source: /note="BBa_J63005"
tttcaagctataccaagcatacaatcaact

SEQ ID NO: 728 - DNA, 30 bp, Artificial Sequence
  source: /note="Description of Artificial Sequence: Synthetic oligonucleotide"
  source: /note="BBa_K105027"
cctttgcagcataaattactatacttctat

SEQ ID NO: 729 - DNA, 30 bp, Artificial Sequence; identical to SEQ ID NO: 728
  source: /note="Description of Artificial Sequence: Synthetic oligonucleotide"
  source: /note="BBa_K105028"

SEQ ID NO: 730 - DNA, 30 bp, Artificial Sequence; identical to SEQ ID NO: 728
  source: /note="Description of Artificial Sequence: Synthetic oligonucleotide"
  source: /note="BBa_K105029"

SEQ ID NO: 731 - DNA, 30 bp, Artificial Sequence; identical to SEQ ID NO: 728
  source: /note="Description of Artificial Sequence: Synthetic oligonucleotide"
  source: /note="BBa_K105030"

SEQ ID NO: 732 - DNA, 30 bp, Artificial Sequence; identical to SEQ ID NO: 728
  source: /note="Description of Artificial Sequence: Synthetic oligonucleotide"
  source: /note="BBa_K105031"

SEQ ID NO: 733 - DNA, 30 bp, Artificial Sequence
  source: /note="Description of Artificial Sequence: Synthetic oligonucleotide"
  source: /note="BBa_K122000"
ttatctactttttacaacaaatataaaaca

SEQ ID NO: 734 - DNA, 30 bp, Artificial Sequence; identical to SEQ ID NO: 724
  source: /note="Description of Artificial Sequence: Synthetic oligonucleotide"
  source: /note="BBa_K124000"

SEQ ID NO: 735 - DNA, 30 bp, Artificial Sequence
  source: /note="Description of Artificial Sequence: Synthetic oligonucleotide"
  source: /note="BBa_K124002"
gtttcgaataaacacacataaacaaacaaa

SEQ ID NO: 736 - DNA, 30 bp, Artificial Sequence; identical to SEQ ID NO: 725
  source: /note="Description of Artificial Sequence: Synthetic oligonucleotide"
  source: /note="BBa_K319005"

SEQ ID NO: 737 - DNA, 30 bp, Artificial Sequence
  source: /note="Description of Artificial Sequence: Synthetic oligonucleotide"
  source: /note="BBa_M31201"
accatcaaaggaagctttaatcttctcata

SEQ ID NO: 738 - DNA, 30 bp, Artificial Sequence
  source: /note="Description of Artificial Sequence: Synthetic oligonucleotide"
  source: /note="BBa_I712004"
agaacccactgcttactggcttatcgaaat

SEQ ID NO: 739 - DNA, 30 bp, Artificial Sequence
  source: /note="Description of Artificial Sequence: Synthetic oligonucleotide"
  source: /note="BBa_K076017"
ggccgtttttggcttttttgttagacgaag

SEQ ID NO: 740 - DNA, 66 bp, Artificial Sequence
  source: /note="Description of Artificial Sequence: Synthetic oligonucleotide"
  source: /note="Plpp"
ataagtgccttcccatcaaaaaaatattctcaacataaaaaactttgtgtaatacttgtaacgcta

SEQ ID NO: 741 - DNA, 52 bp, Artificial Sequence
  source: /note="Description of Artificial Sequence: Synthetic oligonucleotide"
  source: /note="PapFAB46"
aaaaagagtattgacttcgcatctttttgtacctataatagattcattgcta

SEQ ID NO: 742 - DNA, 59 bp, Artificial Sequence
  source: /note="Description of Artificial Sequence: Synthetic oligonucleotide"
  source: /note="PJ23101+UP element"
ggaaaatttttttaaaaaaaaaactttacagctagctcagtcctaggtattatgctagc

SEQ ID NO: 743 - DNA, 59 bp, Artificial Sequence
  source: /note="Description of Artificial Sequence: Synthetic oligonucleotide"
  source: /note="PJ23107+UP element"
ggaaaatttttttaaaaaaaaaactttacggctagctcagccctaggtattatgctagc

SEQ ID NO: 744 - DNA, 64 bp, Artificial Sequence
  source: /note="Description of Artificial Sequence: Synthetic oligonucleotide"
  source: /note="PSYN23119"
ggaaaatttttttaaaaaaaaaacttgacagctagctcagtccttggtataatgctagcacgaa

SEQ ID NO: 745 - protein, 21 aa, Artificial Sequence
  source: /note="Description of Artificial Sequence: Synthetic peptide"
  source: /note="PhoA"
MKQSTIALALLPLLFTPVTKA

SEQ ID NO: 746 - protein, 20 aa, Artificial Sequence
  source: /note="Description of Artificial Sequence: Synthetic peptide"
  source: /note="PhoA"
KQSTIALALLPLLFTPVTKA

SEQ ID NO: 747 - protein, 22 aa, Artificial Sequence
  source: /note="Description of Artificial Sequence: Synthetic peptide"
  source: /note="OmpF"
MMKRNILAVIVPALLVAGTANA

SEQ ID NO: 748 - protein, 15 aa, Artificial Sequence
  source: /note="Description of Artificial Sequence: Synthetic peptide"
  source: /note="cvaC"
MRTLTLNELDSVSGG

SEQ ID NO: 749 - protein, 43 aa, Artificial Sequence
  source: /note="Description of Artificial Sequence: Synthetic polypeptide"
  source: /note="TorA"
MNNNDLFQASRRRFLAQLGGLTVAGMLGTSLLTPRRATAAQAA

SEQ ID NO: 750 - protein, 33 aa, Artificial Sequence
  source: /note="Description of Artificial Sequence: Synthetic polypeptide"
  source: /note="fdnG"
MDVSRRQFFKICAGGMAGTTVAALGFAPKQALA

SEQ ID NO: 751 - protein, 45 aa, Artificial Sequence
  source: /note="Description of Artificial Sequence: Synthetic polypeptide"
  source: /note="dmsA"
MKTKIPDAVLAAEVSRRGLVKTTAIGGLAMASSALTLPFSRIAHA

SEQ ID NO: 752 - protein, 21 aa, Artificial Sequence
  source: /note="Description of Artificial Sequence: Synthetic peptide"
  source: /note="PelB"
KYLLPTAAAGLLLLAAQPAMA

SEQ ID NO: 753 - protein, 52 aa, Artificial Sequence
  source: /note="Description of Artificial Sequence: Synthetic polypeptide"
  source: /note="HlyA secretion signal"
LNPLINEISKIISAAGNFDVKEERAAASLLQLSGNASDFSYGRNSITLTASA

SEQ ID NO: 754 - DNA, 159 bp, Artificial Sequence
  source: /note="Description of Artificial Sequence: Synthetic polynucleotide"
  source: /note="HlyA secretion signal"
cttaatccattaattaatgaaatcagcaaaatcatttcagctgcaggtaattttgatgttaaagaggaaagagctgcagcttctttattgcagttgtccggtaatgccagtgatttttcatatggacggaactcaataactttgacagcatcagcataa

SEQ ID NO: 755 - DNA, 355 bp, Artificial Sequence
  source: /note="Description of Artificial Sequence: Synthetic polynucleotide"
  source: /note="VH (10D1)"
caggtgcagctggtggagtctgggggaggcgtggtccagcctgggaggtccctgagactctcctgtgcagcctctggattcaccttcagtagctatactatgcactgggtccgccaggctccaggcaaggggctggagtgggtgacatttatatcatatgatggaaacaataaatactacgcagactccgtgaagggccgattcaccatctccagagacaattccaagaacacgctgtatctgcaaatgaacagcctgagagctgaggacacggctatatattactgtgcgaggaccggctggctggggccctttgactactggggccagggaaccctggtcaccgtctcctcag

SEQ ID NO: 756 - DNA, 325 bp, Artificial Sequence
  source: /note="Description of Artificial Sequence: Synthetic polynucleotide"
  source: /note="VL (10D1)"
gaaattgtgttgacgcagtctccaggcaccctgtctttgtctccaggggaaagagccaccctctcctgcagggccagtcagagtgttggcagcagctacttagcctggtaccagcagaaacctggccaggctcccaggctcctcatctatggtgcattcagcagggccactggcatcccagacaggttcagtggcagtgggtctgggacagacttcactctcaccatcagcagactggagcctgaagattttgcagtgtattactgtcagcagtatggtagctcaccgtggacgttcggccaagggaccaaggtggaaatcaaac

SEQ ID NO: 757 - DNA, 355 bp, Artificial Sequence
  source: /note="Description of Artificial Sequence: Synthetic polynucleotide"
  source: /note="VH (4B6)"
caggtgcagctggtggagtctgggggaggcgtggtccagcctgggaggtccctgagactctcctgtgcagcctctggattcaccttcagtagctatactatgcactgggtccgccaggctccaggcaaggggctggagtgggtgacatttatatcatatgatggaagcaataaacactacgcagactccgtgaagggccgattcaccgtctccagagacaattccaagaacacgctgtatctgcaaatgaacagcctgagagctgaggacacggctatatattactgtgcgaggaccggctggctggggccctttgactactggggccagggaaccctggtcaccgtctcctcag

SEQ ID NO: 758 - DNA, 325 bp, Artificial Sequence
  source: /note="Description of Artificial Sequence: Synthetic polynucleotide"
  source: /note="VL (4B6)"
gaaattgtgttgacgcagtctccaggcaccctgtctttgtctccaggggaaagagccaccctctcctgcagggccagtcagagtgttagcagcagcttcttagcctggtaccagcagaaacctggccaggctcccaggctcctcatctatggtgcatccagcagggccactggcatcccagacaggttcagtggcagtgggtctgggacagacttcactctcaccatcagcagactggagcctgaagattttgcagtgtattactgtcagcagtatggtagctcaccgtggacgttcggccaagggaccaaggtggaaatcaaac

SEQ ID NO: 759 - DNA, 358 bp, Artificial Sequence
  source: /note="Description of Artificial Sequence: Synthetic polynucleotide"
  source: /note="VH (1E2)"
caggtgcagctggtggagtctgggggaggcgtggtccagcctgggaggtccctgagactctcctgtgcagcgtctggattcaccttcagtagctatggcatgcactgggtccgccaggctccaggcaaggggctggagtgggtggcagttatatggtatgatggaagtaataaatactatgcagactccgtgaagggccgattcaccatctccagagacaattccaagaacacgctgtatctgcaaatgaacagcctgagagccgaggacacggctgtgttttactgtgcgagagctcccaattatattggtgcttttgatgtctggggccaagggacaatggtcaccgtctcttcag

SEQ ID NO: 760 - DNA, 322 bp, Artificial Sequence
  source: /note="Description of Artificial Sequence: Synthetic polynucleotide"
  source: /note="VL (1E2)"
gacatccagatgacccagtctccatcctcactgtctgcatctgtaggagacagagtcaccatcacttgtcgggcgagtcagggtattagcagctggttagcctggtatcagcagaaaccagagaaagcccctaagtccctgatctatgctgcatccagtttgcaaagtggggtcccatcaaggttcagcggcagtggatctgggacagatttcactctcaccatcagcagcctgcagcctgaagattttgcaacttattactgccaacagtataatagttaccctccgacgttcggccaagggaccaaggtggaaatcaaac

SEQ ID NO: 761 - protein, 451 aa, Artificial Sequence
  source: /note="Description of Artificial Sequence: Synthetic polypeptide"
  source: /note="Heavy chain (human monoclonal)"
QVQLVESGGGVVQPGRSLRLSCAASGFTFSSYGMHWVRQAPGKGLEWVAVIWYDGSNKYYADSVKGRFTISRDNSKNTLYLQMNSLRAEDTAVYYCARDPRGATLYYYYYGMDVWGQGTTVTVSSASTKGPSVFPLAPCSRSTSESTAALGCLVKDYFPEPVTVSWNSGALTSGVHTFPAVLQSSGLYSLSSVVTVPSSNFGTQTYTCNVDHKPSNTKVDKTVERKCCVECPPCPAPPVAGPSVFLFPPKPKDTLMISRTPEVTCVVVDVSHEDPEVQFNWYVDGVEVHNAKTKPREEQFNSTFRVVSVLTVVHQDWLNGKEYKCKVSNKGLPAPIEKTISKTKGQPREPQVYTLPPSREEMTKNQVSLTCLVKGFYPSDIAVEWESNGQPENNYKTTPPMLDSDGSFFLYSKLTVDKSRWQQGNVFSCSVMHEALHNHYTQKSLSLSPGK

SEQ ID NO: 762 - protein, 214 aa, Artificial Sequence; identical to SEQ ID NO: 10
  source: /note="Description of Artificial Sequence: Synthetic polypeptide"
  source: /note="Light chain (human monoclonal)"

SEQ ID NO: 763 - protein, 448 aa, Artificial Sequence; identical to SEQ ID NO: 5
  source: /note="Description of Artificial Sequence: Synthetic polypeptide"
  source: /note="Heavy chain (human monoclonal)"

SEQ ID NO: 764 - protein, 215 aa, Artificial Sequence; identical to SEQ ID NO: 7
  source: /note="Description of Artificial Sequence: Synthetic polypeptide"
  source: /note="Light chain (human monoclonal)"

SEQ ID NO: 765 - protein, 242 aa, Artificial Sequence
  source: /note="Description of Artificial Sequence: Synthetic polypeptide"
  source: /note="anti CTLA-4 scFv; Heavy Chain  linker  Light Chain Transcribed from the native FliC promoter and 5UTR (untranslated region) with an optimized ribosome binding site "
MQVQLVESGGGVVQPGRSLRLSCAASGFTFSSYTMHWVRQAPGKGLEWVTFISYDGNNKYYADSVKGRFTISRDNSKNTLYLQMNSLRAEDTAIYYCARTGWLGPFDYWGQGTLVTVSSGGGSGGGSGGGSGGGEIVLTQSPGTLSLSPGERATLSCRASQSVGSSYLAWYQQKPGQAPRLLIYGAFSRATGIPDRFSGSGSGTDFTLTISRLEPEDFAVYYCQQYGSSPWTFGQGTKVEIK

SEQ ID NO: 766 - DNA, 1103 bp, Artificial Sequence
  source: /note="Description of Artificial Sequence: Synthetic polynucleotide"
  source: /note="anti CTLA-4 scFv; Codon-optimized Heavy Chain  linker Light Chain Transcribed from the native FliC promoter and 5UTR (untranslated region) with an optimized ribosome binding site "
agcgggaataaggggcagagaaaagagtatttcgtcgactaacaaaaaatggctgtttgtgaaaaaaattctaaaggttgttttacgacagacgataacagggttgacggcgattgagccgacgggtggaaacccaaaacgtaatcaacaaataaaaatgaggaggcaattctaatgcaagtgcaactggtagagtccggtgggggcgtggtgcagccgggtcgcagcctgcgtctgtcgtgcgcggcgagtggttttacgttttcgagttatactatgcactgggttcgtcaagcgccgggcaaaggcctggaatgggttactttcatttcttacgatggtaataataaatattatgcggattctgtgaaaggtcgctttactatttcgcgcgataacagtaaaaacactctgtatctgcaaatgaattctctgcgtgcagaggatactgctatctattactgcgcgcgtacgggctggttgggcccgtttgattattggggccaaggcactttggttactgtgtcatcgggcgggggctctggcggtggttcaggtggtggcagtggtggtggcgagatcgtgttgactcaatctccgggtactctgtctctgtctccgggtgaacgcgcgaccctgtcttgccgcgcttctcagagtgttggttcatcgtatctggcatggtatcaacagaaaccgggtcaagcgccgcgtctgctgatttacggtgcttttagtcgcgcaaccgggattccggatcgattttctggttcaggttctggcactgactttactttgactattagtcgtctggaaccggaggacttcgcggtttattattgccaacagtatggttcttctccgtggacctttggtcaaggcactaaagttgaaattaaataatcgccgtaacctgattaactgagactgacggcaacgccaaattgcctgatgcgctgcgcttatcaggcctacaaggggaattgcaatttattgaatttgcacatttttgtaggccggataaggcgtttacgccgcatccggcaacatgaatggtaatttgccagcaacgtgcttccccgccaacggcggggttttttctg

SEQ ID NO: 767 - protein, 242 aa, Artificial Sequence
  source: /note="Description of Artificial Sequence: Synthetic polypeptide"
  source: /note="anti CTLA-4 scFv; Light Chain  linker  Heavy Chain Transcribed from the native FliC promoter and 5UTR (untranslated region) with an optimized ribosome binding site "
MEIVLTQSPGTLSLSPGERATLSCRASQSVGSSYLAWYQQKPGQAPRLLIYGAFSRATGIPDRFSGSGSGTDFTLTISRLEPEDFAVYYCQQYGSSPWTFGQGTKVEIKGGGSGGGSGGGSGGGQVQLVESGGGVVQPGRSLRLSCAASGFTFSSYTMHWVRQAPGKGLEWVTFISYDGNNKYYADSVKGRFTISRDNSKNTLYLQMNSLRAEDTAIYYCARTGWLGPFDYWGQGTLVTVSS

SEQ ID NO: 768 - DNA, 1103 bp, Artificial Sequence
  source: /note="Description of Artificial Sequence: Synthetic polynucleotide"
  source: /note="anti CTLA-4 scFv; Codon-optimized Light Chain  linker Heavy Chain Transcribed from the native FliC promoter and 5UTR (untranslated region) with an optimized ribosome binding site "
agcgggaataaggggcagagaaaagagtatttcgtcgactaacaaaaaatggctgtttgtgaaaaaaattctaaaggttgttttacgacagacgataacagggttgacggcgattgagccgacgggtggaaacccaaaacgtaatcaacagattataaggagttaaatagaaaaatggagattgtactgacccagagccctggtacattgtctttgtcgcctggtgaacgcgcgactctgtcttgtcgtgcgtctcagtctgttggtagttcgtatctggcgtggtatcaacaaaaaccgggccaagctccgcgtctgctgatttacggtgcatttagccgcgcgactggcattccggaccgcttttctgggtctggctcaggtaccgattttactctgactatttcgcgtctggagccggaggatttcgcggtttattactgccagcaatatggttctagtccgtggaccttcggccaaggtactaaagtggaaatcaaaggcgggggttcgggtggtggctctgggggtggctcgggcggtgggcaggtgcaactggttgagagtggtggcggcgttgttcaaccgggccgctctctgcgcctgtcgtgcgctgcttctggctttacctttagctcttatacgatgcactgggttcgccaagctccgggtaaaggtctggagtgggtgactttcatttcttacgatggtaacaacaaatattatgctgattctgttaaaggccgttttactatttctcgagacaatagcaaaaacactctgtacctgcagatgaattctctgcgcgctgaagacaccgcgatttattattgtgcgcgcactggttggctgggtccgtttgattattggggtcagggcacgctggttactgttagctcgtgatcgccgtaacctgattaactgagactgacggcaacgccaaattgcctgatgcgctgcgcttatcaggcctacaaggggaattgcaatttattgaatttgcacatttttgtaggccggataaggcgtttacgccgcatccggcaacatgaatggtaatttgccagcaacgtgcttccccgccaacggcggggttttttctg

SEQ ID NO: 769 - protein, 236 aa, Artificial Sequence
  source: /note="Description of Artificial Sequence: Synthetic polypeptide"
  source: /note="anti PD-1 scFv; Heavy Chain  linker  Light Chain Transcribed from the native FliC promoter and 5UTR (untranslated region) with an optimized ribosome binding site "
MQVQLVESGGGVVQPGRSLRLDCKASGITFSNSGMHWVRQAPGKGLEWVAVIWYDGSKRYYADSVKGRFTISRDNSKNTLFLQMNSLRAEDTAVYYCATNDDYWGQGTLVTVSSGGGSGGGSGGGSGGGEIVLTQSPATLSLSPGERATLSCRASQSVSSYLAWYQQKPGQAPRLLIYDASNRATGIPARFSGSGSGTDFTLTISSLEPEDFAVYYCQQSSNWPRTFGQGTKVEIK

SEQ ID NO: 770 - DNA, 1095 bp, Artificial Sequence
  source: /note="Description of Artificial Sequence: Synthetic polynucleotide"
  source: /note="anti PD-1 scFv; Codon-optimized Heavy Chain  linker Light Chain Transcribed from the native FliC promoter and 5UTR (untranslated region) with an optimized ribosome binding site "
agcgggaataaggggcagagaaaagagtatttcgtcgactaacaaaaaatggctgtttgtgaaaaaaattctaaaggttgttttacgacagacgataacagggttgacggcgattgagccgacgggtggaaacccaaaacgtaatcaacctcaaagaattataggaaaggaggaagcgataagtatgcaggtgcaattggtggagtcgggtggcggcgtggtgcaaccgggtcgtagcctgcgcctggattgtaaagcgtcaggcatcacgtttagcaattctggcatgcactgggtgcgtcaagcgccgggcaaaggtctggagtgggttgcggtaatttggtacgatggttctaaacgctattacgcggatagtgtgaaaggtcgctttactatctctcgcgataattctaaaaacaccctgtttctgcaaatgaattcgttgcgtgcggaagatactgcggtatattattgtgctactaacgatgattattggggtcaaggcaccctggtgactgtttcgagcggcggtggtagcggcggcggctctggtggtggttctggtggcggtgagattgtgctgactcaaagcccggcgaccctgtctctgtcgccgggtgaacgcgctactctgagttgccgtgcgtcgcaaagcgtgtcttcttatctggcgtggtaccaacaaaaaccgggtcaagcgccgcgcctgctgatatatgatgctagtaatcgtgcaacgggtattccggcacgcttttcaggttctggcagcggcaccgatttcactctgactatctcgtcactggagccggaagactttgcggtttattattgtcagcaatcttctaattggccgcgtacgtttggtcagggcactaaagttgaaatcaaataatcgccgtaacctgattaactgagactgacggcaacgccaaattgcctgatgcgctgcgcttatcaggcctacaaggggaattgcaatttattgaatttgcacatttttgtaggccggataaggcgtttacgccgcatccggcaacatgaatggtaatttgccagcaacgtgcttccccgccaacggcggggttttttctg

SEQ ID NO: 771 - protein, 236 aa, Artificial Sequence
  source: /note="Description of Artificial Sequence: Synthetic polypeptide"
  source: /note="anti PD-1 scFv; Light Chain  linker  Heavy Chain Transcribed from the native FliC promoter and 5UTR (untranslated region) with an optimized ribosome binding site "
MEIVLTQSPATLSLSPGERATLSCRASQSVSSYLAWYQQKPGQAPRLLIYDASNRATGIPARFSGSGSGTDFTLTISSLEPEDFAVYYCQQSSNWPRTFGQGTKVEIKGGGSGGGSGGGSGGGQVQLVESGGGVVQPGRSLRLDCKASGITFSNSGMHWVRQAPGKGLEWVAVIWYDGSKRYYADSVKGRFTISRDNSKNTLFLQMNSLRAEDTAVYYCATNDDYWGQGTLVTVSS

SEQ ID NO: 772 - DNA, 1085 bp, Artificial Sequence
  source: /note="Description of Artificial Sequence: Synthetic polynucleotide"
  source: /note="anti PD-1 scFv; Codon-optimized Light Chain  linker Heavy Chain Transcribed from the native FliC promoter and 5UTR (untranslated region) with an optimized ribosome binding site "
agcgggaataaggggcagagaaaagagtatttcgtcgactaacaaaaaatggctgtttgtgaaaaaaattctaaaggttgttttacgacagacgataacagggttgacggcgattgagccgacgggtggaaacccaaaacgtaatcaacatcaccaatttgaggaaaggtaaatatggaaatcgttttaacgcagtcgccggcgactctgtctttgtcgcctggtgaacgtgctacgctgtcttgccgcgcgtcacagtctgtgtcgtcatatctggcttggtaccaacagaaaccgggccaagctccgcgcctgctgatttatgatgcgtctaatcgcgcgaccggcattccggcgcgtttttctggctccggctctggcaccgactttactctgactatttcgtctctggaaccggaagattttgcggtgtactattgccagcaatcttctaattggccgcgcacgtttggtcaaggtaccaaggttgagatcaaaggtggtggctcgggcggcggttcgggcggcggctcaggtggtggccaagttcagttggttgagtctggcgggggcgtagtacaaccgggtcgttctttgcgtctggattgcaaagcgagcggtattacctttagcaattcaggtatgcactgggtgcgccaagcgccgggcaaaggcctggaatgggttgcggtgatttggtacgatggctcgaaacgttattatgctgacagcgttaaaggtcgttttactattagccgtgataattccaaaaatacgctgtttctgcagatgaatagcctgcgtgctgaagacactgcggtttattactgtgctactaatgatgattactggggccagggcaccctggtgactgtgagttcttaatcgccgtaacctgattaactgagactgacggcaacgccaaattgcctgatgcgctgcgcttatcaggcctacaaggggaattgcaatttattgaatttgcacatttttgtaggccggataaggcgtttacgccgcatccggcaacatgaatggtaatttgccagcaacgtgcttccccgccaacggcggggttttttctg

SEQ ID NO: 773 - protein, 242 aa, Artificial Sequence
  source: /note="Description of Artificial Sequence: Synthetic polypeptide"
  source: /note="anti PDL-1 scFv; Heavy Chain  linker  Light Chain Transcribed from the native FliC promoter and 5UTR (untranslated region) with an optimized ribosome binding site "
MEVQLVESGGGLVQPGGSLRLSCAASGFTFSDSWIHWVRQAPGKGLEWVAWISPYGGSTYYADSVKGRFTISADTSKNTAYLQMNSLRAEDTAVYYCARRHWPGGFDYWGQGTLVTVSSGGGSGGGSGGGSGGGDIQMTQSPSSLSASVGDRVTITCRASQDVSTAVAWYQQKPGKAPKLLIYSASFLYSGVPSRFSGSGSGTDFTLTISSLQPEDFATYYCQQYLYHPATFGQGTKVEIKR

SEQ ID NO: 774 - DNA, 1103 bp, Artificial Sequence
  source: /note="Description of Artificial Sequence: Synthetic polynucleotide"
  source: /note="anti PDL-1 scFv; Codon-optimized Heavy Chain  linker Light Chain Transcribed from the native FliC promoter and 5UTR (untranslated region) with an optimized ribosome binding site "
agcgggaataaggggcagagaaaagagtatttcgtcgactaacaaaaaatggctgtttgtgaaaaaaattctaaaggttgttttacgacagacgataacagggttgacggcgattgagccgacgggtggaaacccaaaacgtaatcaactacataattttggggagggtactcgatggaagttcagctggtggagagtggtggcggtctggtgcagccgggcggctctctgcgtctgagctgtgcggcgtctggctttacgttttctgacagttggattcactgggtgcgccaagcaccgggcaaaggcctggagtgggtggcgtggatttctccgtatggcggtagtacttattatgctgattctgtgaaaggccgttttaccatttcggcggacacttcaaaaaataccgcgtatctgcaaatgaatagcctgcgcgctgaagacacggctgtttactactgtgctcgccgccactggccgggcggtttcgattattggggccaaggcactctggtgactgtgagctctggcggcgggtcgggtggcggttctggcggtggcagtggcggtggtgatattcaaatgacccaatctccgtcgtctctgagcgcgtctgtgggcgatcgtgtaaccattacttgtcgtgcgtcgcaggatgtgtctactgctgtggcgtggtatcagcaaaaaccgggtaaagctccgaaactgctgatttatagcgcttcttttctgtatagtggtgttccgtcacgttttagcggttcaggctctggtactgatttcacactgactatttcttctctgcaaccggaagatttcgcgacttattattgtcagcagtacttgtaccacccggcaacttttggtcagggcactaaagttgaaattaaacgttaatcgccgtaacctgattaactgagactgacggcaacgccaaattgcctgatgcgctgcgcttatcaggcctacaaggggaattgcaatttattgaatttgcacatttttgtaggccggataaggcgtttacgccgcatccggcaacatgaatggtaatttgccagcaacgtgcttccccgccaacggcggggttttttctg

SEQ ID NO: 775 - protein, 242 aa, Artificial Sequence
  source: /note="Description of Artificial Sequence: Synthetic polypeptide"
  source: /note="anti PDL-1 scFv; Light Chain  linker  Heavy Chain Transcribed from the native FliC promoter and 5UTR (untranslated region) with an optimized ribosome binding site "
MDIQMTQSPSSLSASVGDRVTITCRASQDVSTAVAWYQQKPGKAPKLLIYSASFLYSGVPSRFSGSGSGTDFTLTISSLQPEDFATYYCQQYLYHPATFGQGTKVEIKRGGGSGGGSGGGSGGGEVQLVESGGGLVQPGGSLRLSCAASGFTFSDSWIHWVRQAPGKGLEWVAWISPYGGSTYYADSVKGRFTISADTSKNTAYLQMNSLRAEDTAVYYCARRHWPGGFDYWGQGTLVTVSS

SEQ ID NO: 776 - DNA, 1103 bp, Artificial Sequence
  source: /note="Description of Artificial Sequence: Synthetic polynucleotide"
  source: /note="anti PDL-1 scFv; Codon-optimized Light Chain  linker Heavy Chain Transcribed from the native FliC promoter and 5UTR (untranslated region) with an optimized ribosome binding site "
agcgggaataaggggcagagaaaagagtatttcgtcgactaacaaaaaatggctgtttgtgaaaaaaattctaaaggttgttttacgacagacgataacagggttgacggcgattgagccgacgggtggaaacccaaaacgtaatcaactggcagacgcctaaggaggaagaccatggatattcagatgactcagagccctagctcactgtctgcgtcagttggcgatcgtgtgactattacctgtcgcgctagtcaggatgtgtctacggcggttgcgtggtatcaacagaaaccgggcaaagctccgaaactgttgatttattcagcgtctttcctgtattcgggtgtgccttctcgcttttcgggctctggtagcggtactgattttacgctgactattagttcactgcaaccggaggactttgcgacttattattgccaacaatacctgtatcacccggcgacctttggtcaaggcactaaagtggaaattaaacgcggcggcggcagcggtggcggctctggtggtgggtctggtggtggtgaggttcagctggttgagtctggtggtggtctggttcaacctgggggcagcctgcgcctgtcgtgcgcggcgtctggttttacgttctcagattcttggattcactgggtacgtcaagctccgggcaaaggtctggagtgggtggcgtggatttctccgtatggcggttcgacgtattacgcggactctgttaaagggcgttttacgatctcagcggatacttctaaaaatactgcgtatctgcaaatgaattctctgcgagcggaggataccgcggtgtattactgtgctcgccgccactggcctggtggtttcgattattggggtcaaggtaccctggtgactgtttcgtcttaatcgccgtaacctgattaactgagactgacggcaacgccaaattgcctgatgcgctgcgcttatcaggcctacaaggggaattgcaatttattgaatttgcacatttttgtaggccggataaggcgtttacgccgcatccggcaacatgaatggtaatttgccagcaacgtgcttccccgccaacggcggggttttttctg

SEQ ID NO: 777 - protein, 606 aa, Artificial Sequence
  source: /note="Description of Artificial Sequence: Synthetic polypeptide"
  source: /note="anti CTLA-4 scFv"
MNKVYSLKYCPVTGGLIVVSELASRVIKKTCRRLTHILLAGIPAVYLYYPQISQAGIVRQVQLVESGGGVVQPGRSLRLSCAASGFTFSSYTMHWVRQAPGKGLEWVTFISYDGNNKYYADSVKGRFTISRDNSKNTLYLQMNSLRAEDTAIYYCARTGWLGPFDYWGQGTLVTVSSGGGSGGGSGGGSGGGEIVLTQSPGTLSLSPGERATLSCRASQSVGSSYLAWYQQKPGQAPRLLIYGAFSRATGIPDRFSGSGSGTDFTLTISRLEPEDFAVYYCQQYGSSPWTFGQGTKVEIKFKAEADKAAAAKADSFMNAGYKNFMTEVNNLNKRMGDLRDTNGDAGAWARIMSGAGSADGGYSDNYTHVQVGFDKKHELDGVDLFTGVTMTYTDSSADSHAFSGKTKSVGGGLYASALFESGAYIDLIGKYIHHDNDYTGNFAGLGTKHYNTHSWYAGAETGYRYHLTEETFIEPQAELVYGAVSGKTFRWKDGDMDLSMKNRDFSPLIGRTGIELGKTFSGKDWSVTARAGTSWQFDLLNNGETVLRDASGEKRIKGEKDSRMLFNVGMNAQIKDNMRFGLEFEKSAFGKYNVDNAVNANFRYMF

SEQ ID NO: 778 - DNA, 2038 bp, Artificial Sequence
  source: /note="Description of Artificial Sequence: Synthetic polynucleotide"
  source: /note="anti CTLA-4 scFv"
atctaatctagacatcattaattcctaatttttgttgacactctatcattgatagagttattttaccactccctatcagtgatagagaaaagtgaattaaatatcaactagaggtcaccaaatgaacaaagtatatagcctgaaatattgcccagtaactgggggtctgattgtagtcagtgaactggcatcccgcgtcatcaaaaaaacctgccgtcgtctgactcacatcctgctggcgggtattccggctgtgtatctgtactacccgcagatctcccaggcaggtatcgtccgccaggtacaattagttgagagcggcggcggtgtggttcaaccgggccgtagtctgcgattgtcttgtgctgcatctggttttactttcagttcttacacgatgcactgggttcgccaagctccgggcaaaggcctggagtgggttacctttatttcttacgatggcaataataagtattacgctgattctgtgaaaggtcgctttactattagccgagataactctaaaaatactctgtatctgcaaatgaattctctgcgtgcggaagatactgcgatctattattgtgcgcgtactggttggctgggcccgtttgattattggggccaaggcacgctggttactgttagttcgggcggcggttctggtggcggctctggtggtggctctggcggcggcgagattgtgctgactcaatctccgggcacgctgtcactgtctccgggtgaacgcgcgaccctgtcttgtcgcgcgagtcaaagtgttggttcttcttatctggcttggtatcagcaaaagcctggtcaagcgccgcgtctgttgatttatggcgcgttttcgcgcgcgactggcattccggaccgattttctggttctggttctggcactgatttcactctgaccatttcacgcctggaaccggaggattttgcggtgtactattgccaacaatatggctcatcgccgtggacgtttggccaaggtactaaagttgagattaaattcaaagcggaggctgacaaggccgctgcagcaaaagctgactcctttatgaacgcgggttacaaaaacttcatgaccgaggtaaataatctcaataaacgtatgggtgatctgcgcgacactaatggggatgcaggcgcatgggcacgcattatgtctggtgcaggttcggcggatggcgggtattctgacaattacactcatgttcaggtgggcttcgataaaaaacatgagctggacggtgtggatctgttcactggcgtaaccatgacttatactgattcaagcgcagacagccacgcattttcaggtaaaacgaaatcagttggcggcggtctgtatgcgagcgcactgttcgagagcggcgcctacattgatctaattggcaagtatattcaccatgataatgattacacagggaactttgcaggcctgggcaccaaacactataacacgcattcatggtacgctggcgcagaaaccggctatagataccacctgaccgaggaaacctttatcgaaccgcaagcggaactggtttacggtgcggtcagtggcaagacctttcgttggaaagatggtgatatggatctgtcaatgaaaaaccgcgacttcagccccttgatcggccgcaccggcattgagctgggcaaaaccttctctggcaaagattggtctgttaccgcgcgtgcgggcacttcgtggcaatttgatctgctaaacaacggtgagactgtactgcgtgatgcgagtggcgaaaaacgtattaaaggtgaaaaagatagtagaatgctattcaacgtgggcatgaatgcgcagatcaaagataacatgcgttttgggttggagtttgaaaaatccgcgttcggtaaatataatgttgacaatgctgtgaacgcgaatttccgctacatgttttaactctaacggacttgagtgaggttgtaaagggagttggctcctcggtaccaaattccagaaaagaggcctcccgaaaggggggccttttttcgtttt

SEQ ID NO: 779 - protein, 606 aa, Artificial Sequence
  source: /note="Description of Artificial Sequence: Synthetic polypeptide"
  source: /note="anti CTLA-4 scFv"
MNKVYSLKYCPVTGGLIVVSELASRVIKKTCRRLTHILLAGIPAVYLYYPQISQAGIVREIVLTQSPGTLSLSPGERATLSCRASQSVGSSYLAWYQQKPGQAPRLLIYGAFSRATGIPDRFSGSGSGTDFTLTISRLEPEDFAVYYCQQYGSSPWTFGQGTKVEIKGGGSGGGSGGGSGGGQVQLVESGGGVVQPGRSLRLSCAASGFTFSSYTMHWVRQAPGKGLEWVTFISYDGNNKYYADSVKGRFTISRDNSKNTLYLQMNSLRAEDTAIYYCARTGWLGPFDYWGQGTLVTVSSFKAEADKAAAAKADSFMNAGYKNFMTEVNNLNKRMGDLRDTNGDAGAWARIMSGAGSADGGYSDNYTHVQVGFDKKHELDGVDLFTGVTMTYTDSSADSHAFSGKTKSVGGGLYASALFESGAYIDLIGKYIHHDNDYTGNFAGLGTKHYNTHSWYAGAETGYRYHLTEETFIEPQAELVYGAVSGKTFRWKDGDMDLSMKNRDFSPLIGRTGIELGKTFSGKDWSVTARAGTSWQFDLLNNGETVLRDASGEKRIKGEKDSRMLFNVGMNAQIKDNMRFGLEFEKSAFGKYNVDNAVNANFRYMF

SEQ ID NO: 780 - DNA, 2038 bp, Artificial Sequence
  source: /note="Description of Artificial Sequence: Synthetic polynucleotide"
  source: /note="anti CTLA-4 scFv"
atctaatctagacatcattaattcctaatttttgttgacactctatcattgatagagttattttaccactccctatcagtgatagagaaaagtgaattaaatatcaactagaggtcaccaaatgaacaaagtatatagcctgaaatattgcccagtaactgggggtctgattgtagtcagtgaactggcatcccgcgtcatcaaaaaaacctgccgtcgtctgactcacatcctgctggcgggtattccggctgtgtatctgtactacccgcagatctcccaggcaggtatcgtccgcgaaattgtactgacccagtcgcctggtaccctgtctctgtcgccgggtgaacgtgctaccctgtcttgtcgtgcttcgcaatcggttggctcgtcttatctggcatggtatcagcaaaaaccgggccaagcgcctcgtctgctgatttatggcgcgttttctcgtgctacgggcattcctgatcgtttttcgggctctggctctggtactgattttacgctgactatcagccgcttggaacctgaagattttgcggtttattattgccaacaatatggctcttctccgtggacgtttggtcaaggcactaaagttgaaattaaaggtggtggctcgggcggtggttctggtggtggtagtggtggtggtcaagtgcagttggttgaatcgggtggcggtgttgtgcagccgggccgttcgttgcgtctgtcttgcgcagcgagtggtttcaccttctcttcttatactatgcactgggtgcgtcaagcacctggcaaaggtctggagtgggtaacttttatttcatacgatggtaataataaatattatgcagattctgttaaaggtcgctttacgatttctcgcgataattcaaaaaatacgctgtatctgcagatgaattcgctgcgcgctgaggatactgcgatctactattgtgcgcgtactggttggctgggtccgtttgattactggggccaaggtacgctggttacagtttcgtcgttcaaagcggaggctgacaaggccgctgcagcaaaagctgactcctttatgaacgcgggttacaaaaacttcatgaccgaggtaaataatctcaataaacgtatgggtgatctgcgcgacactaatggggatgcaggcgcatgggcacgcattatgtctggtgcaggttcggcggatggcgggtattctgacaattacactcatgttcaggtgggcttcgataaaaaacatgagctggacggtgtggatctgttcactggcgtaaccatgacttatactgattcaagcgcagacagccacgcattttcaggtaaaacgaaatcagttggcggcggtctgtatgcgagcgcactgttcgagagcggcgcctacattgatctaattggcaagtatattcaccatgataatgattacacagggaactttgcaggcctgggcaccaaacactataacacgcattcatggtacgctggcgcagaaaccggctatagataccacctgaccgaggaaacctttatcgaaccgcaagcggaactggtttacggtgcggtcagtggcaagacctttcgttggaaagatggtgatatggatctgtcaatgaaaaaccgcgacttcagccccttgatcggccgcaccggcattgagctgggcaaaaccttctctggcaaagattggtctgttaccgcgcgtgcgggcacttcgtggcaatttgatctgctaaacaacggtgagactgtactgcgtgatgcgagtggcgaaaaacgtattaaaggtgaaaaagatagtagaatgctattcaacgtgggcatgaatgcgcagatcaaagataacatgcgttttgggttggagtttgaaaaatccgcgttcggtaaatataatgttgacaatgctgtgaacgcgaatttccgctacatgttttaactctaacggacttgagtgaggttgtaaagggagttggctcctcggtaccaaattccagaaaagaggcctcccgaaaggggggccttttttcgtttt

SEQ ID NO: 781 - protein, 600 aa, Artificial Sequence
  source: /note="Description of Artificial Sequence: Synthetic polypeptide"
  source: /note="anti PD-1 scFv"
MNKVYSLKYCPVTGGLIVVSELASRVIKKTCRRLTHILLAGIPAVYLYYPQISQAGIVRQVQLVESGGGVVQPGRSLRLDCKASGITFSNSGMHWVRQAPGKGLEWVAVIWYDGSKRYYADSVKGRFTISRDNSKNTLFLQMNSLRAEDTAVYYCATNDDYWGQGTLVTVSSGGGSGGGSGGGSGGGEIVLTQSPATLSLSPGERATLSCRASQSVSSYLAWYQQKPGQAPRLLIYDASNRATGIPARFSGSGSGTDFTLTISSLEPEDFAVYYCQQSSNWPRTFGQGTKVEIKFKAEADKAAAAKADSFMNAGYKNFMTEVNNLNKRMGDLRDTNGDAGAWARIMSGAGSADGGYSDNYTHVQVGFDKKHELDGVDLFTGVTMTYTDSSADSHAFSGKTKSVGGGLYASALFESGAYIDLIGKYIHHDNDYTGNFAGLGTKHYNTHSWYAGAETGYRYHLTEETFIEPQAELVYGAVSGKTFRWKDGDMDLSMKNRDFSPLIGRTGIELGKTFSGKDWSVTARAGTSWQFDLLNNGETVLRDASGEKRIKGEKDSRMLFNVGMNAQIKDNMRFGLEFEKSAFGKYNVDNAVNANFRYMF

SEQ ID NO: 782 - DNA, 2020 bp, Artificial Sequence
  source: /note="Description of Artificial Sequence: Synthetic polynucleotide"
  source: /note="anti PD-1 scFv"
atctaatctagacatcattaattcctaatttttgttgacactctatcattgatagagttattttaccactccctatcagtgatagagaaaagtgaattaaatatcaactagaggtcaccaaatgaacaaagtatatagcctgaaatattgcccagtaactgggggtctgattgtagtcagtgaactggcatcccgcgtcatcaaaaaaacctgccgtcgtctgactcacatcctgctggcgggtattccggctgtgtatctgtactacccgcagatctcccaggcaggtatcgtccgccaagtacaactggttgaatccggcggaggagtggtgcaaccgggccgcagtttgcgtctggattgtaaagcttcaggcatcactttttctaattctggtatgcactgggttcgccaagctccgggtaaaggtctggagtgggttgcggtgatctggtatgatggttctaaacgatattatgcggatagtgttaagggtcgttttactatttctcgtgataattctaagaacaccttgtttctgcagatgaatagtctgcgcgctgaggatactgcggtatattattgtgcgactaatgacgattattggggccaaggcacgctggttaccgtgagctctggtggtggttcgggtggtggttctggtggtgggagcggcggtggcgagatcgttctgactcaaagcccggcgactctgagtctgagtccgggtgaacgtgcgactctgagctgccgtgcgtctcagagtgtgtcgagttatctggcgtggtaccaacaaaaaccgggccaggcgccgcgactgctgatttatgatgcttctaatcgtgcgactggtattccggcgcgctttagcggttctggctcaggcactgacttcactctgactatttcttcgctggaaccggaagattttgcggtgtactattgtcaacaatcatctaattggcctcgtacgttcggtcaaggtacaaaagtggagataaaattcaaagcggaggctgacaaggccgctgcagcaaaagctgactcctttatgaacgcgggttacaaaaacttcatgaccgaggtaaataatctcaataaacgtatgggtgatctgcgcgacactaatggggatgcaggcgcatgggcacgcattatgtctggtgcaggttcggcggatggcgggtattctgacaattacactcatgttcaggtgggcttcgataaaaaacatgagctggacggtgtggatctgttcactggcgtaaccatgacttatactgattcaagcgcagacagccacgcattttcaggtaaaacgaaatcagttggcggcggtctgtatgcgagcgcactgttcgagagcggcgcctacattgatctaattggcaagtatattcaccatgataatgattacacagggaactttgcaggcctgggcaccaaacactataacacgcattcatggtacgctggcgcagaaaccggctatagataccacctgaccgaggaaacctttatcgaaccgcaagcggaactggtttacggtgcggtcagtggcaagacctttcgttggaaagatggtgatatggatctgtcaatgaaaaaccgcgacttcagccccttgatcggccgcaccggcattgagctgggcaaaaccttctctggcaaagattggtctgttaccgcgcgtgcgggcacttcgtggcaatttgatctgctaaacaacggtgagactgtactgcgtgatgcgagtggcgaaaaacgtattaaaggtgaaaaagatagtagaatgctattcaacgtgggcatgaatgcgcagatcaaagataacatgcgttttgggttggagtttgaaaaatccgcgttcggtaaatataatgttgacaatgctgtgaacgcgaatttccgctacatgttttaactctaacggacttgagtgaggttgtaaagggagttggctcctcggtaccaaattccagaaaagaggcctcccgaaaggggggccttttttcgtttt

SEQ ID NO: 783 - protein, 600 aa, Artificial Sequence
  source: /note="Description of Artificial Sequence: Synthetic polypeptide"
  source: /note="anti PD-1 scFv"
MNKVYSLKYCPVTGGLIVVSELASRVIKKTCRRLTHILLAGIPAVYLYYPQISQAGIVREIVLTQSPATLSLSPGERATLSCRASQSVSSYLAWYQQKPGQAPRLLIYDASNRATGIPARFSGSGSGTDFTLTISSLEPEDFAVYYCQQSSNWPRTFGQGTKVEIKGGGSGGGSGGGSGGGQVQLVESGGGVVQPGRSLRLDCKASGITFSNSGMHWVRQAPGKGLEWVAVIWYDGSKRYYADSVKGRFTISRDNSKNTLFLQMNSLRAEDTAVYYCATNDDYWGQGTLVTVSSFKAEADKAAAAKADSFMNAGYKNFMTEVNNLNKRMGDLRDTNGDAGAWARIMSGAGSADGGYSDNYTHVQVGFDKKHELDGVDLFTGVTMTYTDSSADSHAFSGKTKSVGGGLYASALFESGAYIDLIGKYIHHDNDYTGNFAGLGTKHYNTHSWYAGAETGYRYHLTEETFIEPQAELVYGAVSGKTFRWKDGDMDLSMKNRDFSPLIGRTGIELGKTFSGKDWSVTARAGTSWQFDLLNNGETVLRDASGEKRIKGEKDSRMLFNVGMNAQIKDNMRFGLEFEKSAFGKYNVDNAVNANFRYMF

SEQ ID NO: 784 - DNA, 2020 bp, Artificial Sequence
  source: /note="Description of Artificial Sequence: Synthetic polynucleotide"
  source: /note="anti PD-1 scFv"
atctaatctagacatcattaattcctaatttttgttgacactctatcattgatagagttattttaccactccctatcagtgatagagaaaagtgaattaaatatcaactagaggtcaccaaatgaacaaagtatatagcctgaaatattgcccagtaactgggggtctgattgtagtcagtgaactggcatcccgcgtcatcaaaaaaacctgccgtcgtctgactcacatcctgctggcgggtattccggctgtgtatctgtactacccgcagatctcccaggcaggtatcgtccgcgaaatcgtgctgactcagagtccggcgactctgtctctgagtccgggcgaacgcgcgactctgtcttgccgtgcgtctcaatctgtgtcttcatacttggcttggtaccaacaaaaaccgggccaggcgccgcgactgttgatttatgatgcgtcgaatcgcgcgactggcattccggcgcgcttttcgggtagcggttctggtactgattttacgctgactatctcttctctggagcctgaagatttcgctgtttattactgccaacagtctagtaattggccgcgtactttcggccagggcactaaggtggaaattaaaggtggcggctcgggcggcggctcgggtggtggttctggtggtggccaagtgcaactggtggaaagtggcggcggggtggtgcaaccgggccgttctctgcgcctggattgtaaagcttcaggcattacttttagcaactctggtatgcactgggttcgccaagctccgggcaaaggcctggaatgggtggcggttatttggtacgatggctctaaacgttattacgctgacagtgttaaaggccgctttaccatttctcgtgataattctaaaaataccctgtttctgcaaatgaactcgctgcgcgcggaagatactgctgtttactattgtgcgactaatgatgattactggggtcaaggtaccctggttaccgtgtcttctttcaaagcggaggctgacaaggccgctgcagcaaaagctgactcctttatgaacgcgggttacaaaaacttcatgaccgaggtaaataatctcaataaacgtatgggtgatctgcgcgacactaatggggatgcaggcgcatgggcacgcattatgtctggtgcaggttcggcggatggcgggtattctgacaattacactcatgttcaggtgggcttcgataaaaaacatgagctggacggtgtggatctgttcactggcgtaaccatgacttatactgattcaagcgcagacagccacgcattttcaggtaaaacgaaatcagttggcggcggtctgtatgcgagcgcactgttcgagagcggcgcctacattgatctaattggcaagtatattcaccatgataatgattacacagggaactttgcaggcctgggcaccaaacactataacacgcattcatggtacgctggcgcagaaaccggctatagataccacctgaccgaggaaacctttatcgaaccgcaagcggaactggtttacggtgcggtcagtggcaagacctttcgttggaaagatggtgatatggatctgtcaatgaaaaaccgcgacttcagccccttgatcggccgcaccggcattgagctgggcaaaaccttctctggcaaagattggtctgttaccgcgcgtgcgggcacttcgtggcaatttgatctgctaaacaacggtgagactgtactgcgtgatgcgagtggcgaaaaacgtattaaaggtgaaaaagatagtagaatgctattcaacgtgggcatgaatgcgcagatcaaagataacatgcgttttgggttggagtttgaaaaatccgcgttcggtaaatataatgttgacaatgctgtgaacgcgaatttccgctacatgttttaactctaacggacttgagtgaggttgtaaagggagttggctcctcggtaccaaattccagaaaagaggcctcccgaaaggggggccttttttcgtttt

SEQ ID NO: 785 - protein, 606 aa, Artificial Sequence
  source: /note="Description of Artificial Sequence: Synthetic polypeptide"
  source: /note="anti PDL-1 scFv"
MNKVYSLKYCPVTGGLIVVSELASRVIKKTCRRLTHILLAGIPAVYLYYPQISQAGIVRDIQMTQSPSSLSASVGDRVTITCRASQDVSTAVAWYQQKPGKAPKLLIYSASFLYSGVPSRFSGSGSGTDFTLTISSLQPEDFATYYCQQYLYHPATFGQGTKVEIKRGGGSGGGSGGGSGGGEVQLVESGGGLVQPGGSLRLSCAASGFTFSDSWIHWVRQAPGKGLEWVAWISPYGGSTYYADSVKGRFTISADTSKNTAYLQMNSLRAEDTAVYYCARRHWPGGFDYWGQGTLVTVSSFKAEADKAAAAKADSFMNAGYKNFMTEVNNLNKRMGDLRDTNGDAGAWARIMSGAGSADGGYSDNYTHVQVGFDKKHELDGVDLFTGVTMTYTDSSADSHAFSGKTKSVGGGLYASALFESGAYIDLIGKYIHHDNDYTGNFAGLGTKHYNTHSWYAGAETGYRYHLTEETFIEPQAELVYGAVSGKTFRWKDGDMDLSMKNRDFSPLIGRTGIELGKTFSGKDWSVTARAGTSWQFDLLNNGETVLRDASGEKRIKGEKDSRMLFNVGMNAQIKDNMRFGLEFEKSAFGKYNVDNAVNANFRYMF

SEQ ID NO: 786 - DNA, 2038 bp, Artificial Sequence
  source: /note="Description of Artificial Sequence: Synthetic polynucleotide"
  source: /note="anti PDL-1 scFv"
atctaatctagacatcattaattcctaatttttgttgacactctatcattgatagagttattttaccactccctatcagtgatagagaaaagtgaattaaatatcaactagaggtcaccaaatgaacaaagtatatagcctgaaatattgcccagtaactgggggtctgattgtagtcagtgaactggcatcccgcgtcatcaaaaaaacctgccgtcgtctgactcacatcctgctggcgggtattccggctgtgtatctgtactacccgcagatctcccaggcaggtatcgtccgcgaagtgcagctggtggagtcaggtggaggcttggtgcaaccgggcggttcactgcgtctgtcatgtgcggcgtctgggtttacttttagtgactcttggattcactgggtgcgccaggctccgggtaaaggcctggaatgggtagcttggattagtccttacggtggctcgacctattatgctgattcggtaaagggtcgctttactattagcgctgatacttctaaaaatactgcatacctgcagatgaatagcctgcgcgctgaggatactgctgtgtattattgcgcgcgtcgccactggccgggcggctttgattattggggccaaggtactctggttaccgtgtctagtggcggtggtagcggcggcggctcaggtggcggctcgggcggtggcgacattcagatgactcagtctccgtcttctttgtcggcgagcgtgggcgatcgtgttaccatcacgtgtcgcgcgagccaagatgtgtcgactgcggtggcttggtatcaacaaaaaccgggtaaagctccgaaactgctgatttatagtgcgtcttttttgtattctggtgttccgtctcgtttctctggctcaggtagcggtactgattttacgctgactatttcttcactgcaaccggaagattttgctacgtattattgtcaacaatatctgtatcacccggcgacgtttggtcagggtactaaggtggagataaaacgcttcaaagcggaggctgacaaggccgctgcagcaaaagctgactcctttatgaacgcgggttacaaaaacttcatgaccgaggtaaataatctcaataaacgtatgggtgatctgcgcgacactaatggggatgcaggcgcatgggcacgcattatgtctggtgcaggttcggcggatggcgggtattctgacaattacactcatgttcaggtgggcttcgataaaaaacatgagctggacggtgtggatctgttcactggcgtaaccatgacttatactgattcaagcgcagacagccacgcattttcaggtaaaacgaaatcagttggcggcggtctgtatgcgagcgcactgttcgagagcggcgcctacattgatctaattggcaagtatattcaccatgataatgattacacagggaactttgcaggcctgggcaccaaacactataacacgcattcatggtacgctggcgcagaaaccggctatagataccacctgaccgaggaaacctttatcgaaccgcaagcggaactggtttacggtgcggtcagtggcaagacctttcgttggaaagatggtgatatggatctgtcaatgaaaaaccgcgacttcagccccttgatcggccgcaccggcattgagctgggcaaaaccttctctggcaaagattggtctgttaccgcgcgtgcgggcacttcgtggcaatttgatctgctaaacaacggtgagactgtactgcgtgatgcgagtggcgaaaaacgtattaaaggtgaaaaagatagtagaatgctattcaacgtgggcatgaatgcgcagatcaaagataacatgcgttttgggttggagtttgaaaaatccgcgttcggtaaatataatgttgacaatgctgtgaacgcgaatttccgctacatgttttaactctaacggacttgagtgaggttgtaaagggagttggctcctcggtaccaaattccagaaaagaggcctcccgaaaggggggccttttttcgtttt

SEQ ID NO: 787 - protein, 600 aa, Artificial Sequence; identical to SEQ ID NO: 783
  source: /note="Description of Artificial Sequence: Synthetic polypeptide"
  source: /note="anti PDL-1 scFv"

SEQ ID NO: 788 - DNA, 2038 bp, Artificial Sequence
  source: /note="Description of Artificial Sequence: Synthetic polynucleotide"
  source: /note="anti PDL-1 scFv"
atctaatctagacatcattaattcctaatttttgttgacactctatcattgatagagttattttaccactccctatcagtgatagagaaaagtgaattaaatatcaactagaggtcaccaaatgaacaaagtatatagcctgaaatattgcccagtaactgggggtctgattgtagtcagtgaactggcatcccgcgtcatcaaaaaaacctgccgtcgtctgactcacatcctgctggcgggtattccggctgtgtatctgtactacccgcagatctcccaggcaggtatcgtccgcgatattcaaatgactcaatctccgagctctctgagtgcgtctgtgggtgatcgtgtgactattacttgtcgtgcgtctcaagatgtttcaactgcggttgcgtggtatcaacagaaaccgggcaaggcgcctaagctgctgatttattctgcttcgttcctgtacagcggtgtgccgtctcgtttctctggctctggttcgggtactgatttcactctgactatttcgagtctgcagccggaagattttgcgacttattattgtcaacaatatctgtatcaccctgcgacgtttggtcaaggcacgaaagttgaaattaaacgtggtggtggctctggtggtggcagcggtggtgggtcgggtggcggtgaagttcaactggttgagtcaggtggtggcctggtgcaaccgggcggctctctgcgcctgtcttgtgctgcgtcgggttttacgttctctgatagctggattcactgggtacgccaggcaccgggcaaaggtctggaatgggtagcttggatttcaccttatggtggctctacttattacgcggatagcgtgaaaggtcgctttactatttctgcggacactagcaaaaatactgcttacctgcaaatgaattcgctgcgtgctgaggatactgcagtgtattactgtgcgcgtcgtcattggcctggcggctttgattattggggtcaaggtactctggttactgttagcagcttcaaagcggaggctgacaaggccgctgcagcaaaagctgactcctttatgaacgcgggttacaaaaacttcatgaccgaggtaaataatctcaataaacgtatgggtgatctgcgcgacactaatggggatgcaggcgcatgggcacgcattatgtctggtgcaggttcggcggatggcgggtattctgacaattacactcatgttcaggtgggcttcgataaaaaacatgagctggacggtgtggatctgttcactggcgtaaccatgacttatactgattcaagcgcagacagccacgcattttcaggtaaaacgaaatcagttggcggcggtctgtatgcgagcgcactgttcgagagcggcgcctacattgatctaattggcaagtatattcaccatgataatgattacacagggaactttgcaggcctgggcaccaaacactataacacgcattcatggtacgctggcgcagaaaccggctatagataccacctgaccgaggaaacctttatcgaaccgcaagcggaactggtttacggtgcggtcagtggcaagacctttcgttggaaagatggtgatatggatctgtcaatgaaaaaccgcgacttcagccccttgatcggccgcaccggcattgagctgggcaaaaccttctctggcaaagattggtctgttaccgcgcgtgcgggcacttcgtggcaatttgatctgctaaacaacggtgagactgtactgcgtgatgcgagtggcgaaaaacgtattaaaggtgaaaaagatagtagaatgctattcaacgtgggcatgaatgcgcagatcaaagataacatgcgttttgggttggagtttgaaaaatccgcgttcggtaaatataatgttgacaatgctgtgaacgcgaatttccgctacatgttttaactctaacggacttgagtgaggttgtaaagggagttggctcctcggtaccaaattccagaaaagaggcctcccgaaaggggggccttttttcgtttt

SEQ ID NO: 789 - protein, 294 aa, Artificial Sequence
  source: /note="Description of Artificial Sequence: Synthetic polypeptide"
  source: /note="anti CTLA-4 scFv"
MQVQLVESGGGVVQPGRSLRLSCAASGFTFSSYTMHWVRQAPGKGLEWVTFISYDGNNKYYADSVKGRFTISRDNSKNTLYLQMNSLRAEDTAIYYCARTGWLGPFDYWGQGTLVTVSSGGGSGGGSGGGSGGGEIVLTQSPGTLSLSPGERATLSCRASQSVGSSYLAWYQQKPGQAPRLLIYGAFSRATGIPDRFSGSGSGTDFTLTISRLEPEDFAVYYCQQYGSSPWTFGQGTKVEIKLNPLINEISKIISAAGNFDVKEERAAASLLQLSGNASDFSYGRNSITLTASA

SEQ ID NO: 790 - DNA, 5309 bp, Artificial Sequence
  source: /note="Description of Artificial Sequence: Synthetic polynucleotide"
  source: /note="anti CTLA-4 scFv"
gaattcgttaagacccactttcacatttaagttgtttttctaatccgcatatgatcaattcaaggccgaataagaaggctggctctgcaccttggtgatcaaataattcgatagcttgtcgtaataatggcggcatactatcagtagtaggtgtttccctttcttctttagcgacttgatgctcttgatcttccaatacgcaacctaaagtaaaatgccccacagcgctgagtgcatataatgcattctctagtgaaaaaccttgttggcataaaaaggctaattgattttcgagagtttcatactgtttttctgtaggccgtgtacctaaatgtacttttgctccatcgcgatgacttagtaaagcacatctaaaacttttagcgttattacgtaaaaaatcttgccagctttccccttctaaagggcaaaagtgagtatggtgcctatctaacatctcaatggctaaggcgtcgagcaaagcccgcttattttttacatgccaatacaatgtaggctgctctacacctagcttctgggcgagtttacgggttgttaaaccttcgattccgacctcattaagcagctctaatgcgctgttaatcactttacttttatctaatctagacatcattaattcctaatttttgttgacactctatcatttatagagttaatttaccactccctatcagtgatagagaaaagtgaatacgatttaattcggaggttttttgatgcaggtacaattagttgagagcggcggcggtgtggttcaaccgggccgtagtctgcgattgtcttgtgctgcatctggttttactttcagttcttacacgatgcactgggttcgccaagctccgggcaaaggcctggagtgggttacctttatttcttacgatggcaataataagtattacgctgattctgtgaaaggtcgctttactattagccgagataactctaaaaatactctgtatctgcaaatgaattctctgcgtgcggaagatactgcgatctattattgtgcgcgtactggttggctgggcccgtttgattattggggccaaggcacgctggttactgttagttcgggcggcggttctggtggcggctctggtggtggctctggcggcggcgagattgtgctgactcaatctccgggcacgctgtcactgtctccgggtgaacgcgcgaccctgtcttgtcgcgcgagtcaaagtgttggttcttcttatctggcttggtatcagcaaaagcctggtcaagcgccgcgtctgttgatttatggcgcgttttcgcgcgcgactggcattccggaccgattttctggttctggttctggcactgatttcactctgaccatttcacgcctggaaccggaggattttgcggtgtactattgccaacaatatggctcatcgccgtggacgtttggccaaggtactaaagttgagattaaacttaatccattaattaatgaaatcagcaaaatcatttcagctgcaggtaattttgatgttaaagaggaaagagctgcagcttctttattgcagttgtccggtaatgccagtgatttttcatatggacggaactcaataactttgacagcatcagcataatttattaatttaaataatagcaatcttactgggctgtgccacataagattgctatttttttggagtcataatggattcttgtcataaaattgattatgggttatacgccctggagattttagcccaataccataacgtctctgttaacccggaagaaattaaacatagatttgacacagacgggactggtctgggattaacgtcatggttgcttgctgcgaaatctttagaactaaaggtaaaacaggtaaaaaaaacaattgaccgattaaactttatttctttgcccgcattagtctggagagaggatggacgtcattttattctgactaaagtcagtaaagaagcaaacagatatcttatttttgatctggagcaacgaaatccccgtgttctcgaacagtctgagtttgaggcgttatatcaggggcatattattcttattgcttcccgttcttctgttaccgggaaactggcaaaatttgactttacctggtttatccctgccattataaaatacagaaaaatatttattgaaacccttgttgtatctgtttttttacaattatttgcattaataaccccccttttttttcaggtggttatggacaaagtattagtacacagggggttttcaacccttaatgttattactgtcgcattatctgttgtggtggtgtttgagattatactcagcggtttaagaacttacatttttgcacatagtacaagtcggattgatgttgagttgggtgccaaactcttccggcatttactggcgctaccgatctcttattttgagagtcgtcgtgttggtgatactgttgccagggtaagagaattagaccagatccgtaattttctgacaggacaggcattaacatctgttctggacttattattttcattcatattttttgcggtaatgtggtattacagcccaaagcttactctggtgatcttattttcgctgccctgttatgctgcatggtctgtttttattagccccattttgcgacgtcgccttgatgataagttttcacggaatgcggataatcaatctttcctggtggaatcagtcacggcgattaacactataaaagctatggcagtctcacctcagatgacgaacatatgggacaaacaattggcaggatatgttgctgcaggctttaaagtgacagtattagccaccattggtcaacaaggaatacagttaatacaaaagactgttatgatcatcaacctgtggttgggagcacacctggttatttccggggatttaagtattggtcagttaattgcttttaatatgcttgctggtcagattgttgcaccggttattcgccttgcacaaatctggcaggatttccagcaggttggtatatcagttacccgccttggtgatgtgcttaactctccaactgaaagttatcatgggaaactggcattaccggaaattaatggtaatatcacttttcgtaatatccggtttcgctataagcctgactctccggttattttagataatatcaatctcagtattaagcagggggaggttattggtattgtcggacgttctggttcaggaaaaagcacattaactaaattaattcaacgtttttatattcctgaaaatggccaggtcttaattgatggacatgatcttgcgttggccgatcctaactggttacgtcgtcaggtgggggttgtgttgcaggacaatgtgctgcttaatcgcagtattattgataatatctcactggctaatcctggtatgtccgtcgaaaaagttatttatgcagcgaaattagcaggcgctcatgattttatttctgaattgcgtgaggggtataacaccattgtcggggaacagggggcaggattatccggaggtcaacgtcaacgcatcgcaattgcaagggcgctggtgaacaaccctaaaatacttatttttgatgaagcaaccagtgctctggattatgagtcggagcatatcatcatgcgcaatatgcacaaaatatgtaagggcagaacggttataatcattgctcatcgtctgtctacagtaaaaaatgcagaccgcattattgtcatggaaaaagggaaaattgttgaacagggtaaacataaggaactgctttctgaaccggaaagtttatacagttacttatatcagttacagtcagactaacagaaagaacagaagaatatgaaaacatggttaatggggttcagcgagttcctgttgcgctataaacttgtctggagtgaaacatggaaaatccggaagcaattagatactccggtacgtgaaaaggacgaaaatgaattcttacccgctcatctggaattaattgaaacgccggtatccagacggccgcgtctggttgcttattttattatggggtttctggttattgctgtcattttatctgttttaggtcaggtggaaattgttgccactgcaaatgggaaattaacactaagtgggcgcagcaaagaaattaaacctattgaaaactcaatagttaaagaaattatcgtaaaagaaggagagtcagtccggaaaggggatgtgttattaaagcttacagcactgggagctgaagctgatacgttaaaaacacagtcatcactgttacagaccaggctggaacaaactcggtatcaaattctgagcaggtcaattgaattaaataaactacctgaactgaagcttcctgatgagccttattttcagaatgtatctgaagaggaagtactgcgtttaacttctttgataaaagaacagttttccacatggcaaaatcagaagtatcaaaaagaactgaatctggataagaaaagagcagagcgattaacaatacttgcccgtataaaccgttatgaaaatttatcgagagttgaaaaaagccgtctggatgatttcaggagtttattgcataaacaggcaattgcaaaacatgctgtacttgagcaggagaataaatatgtcgaggcagcaaatgaattacgggtttataaatcgcaactggagcaaattgagagtgagatattgtctgcaaaagaagaatatcagcttgtcacgcagctttttaaaaatgaaattttagacaagctaagacaaacaacagacaacattgagttattaactctggagttagagaaaaatgaagagcgtcaacaggcttcagtaatcagggcccctgtttcgggaaaagttcagcaactgaaggttcatactgaaggtggggttgttacaacagcggaaacactgatggtcatcgttccggaagatgacacgctggaggttactgctctggtacaaaataaagatattggttttattaacgtcgggcagaatgccatcattaaagtggaggcctttccttacacccgatatggttatctggtgggtaaggtgaaaaatataaatttagatgcaatagaagaccagaaactgggactcgtttttaatgtcattgtttctgttgaagagaatgatttgtcaaccgggaataagcacattccattaagctcgggtatggctgtcactgcagaaataaagactggaatgcgaagcgtaatcagctatcttcttagtcctctggaagagtctgtaacagaaagtttacatgagcgttaagtctcagagccgcggtatccggctcatatcttctcctg

SEQ ID NO: 791 - protein, 294 aa, Artificial Sequence
  source: /note="Description of Artificial Sequence: Synthetic polypeptide"
  source: /note="anti CTLA-4 scFv"
MEIVLTQSPGTLSLSPGERATLSCRASQSVGSSYLAWYQQKPGQAPRLLIYGAFSRATGIPDRFSGSGSGTDFTLTISRLEPEDFAVYYCQQYGSSPWTFGQGTKVEIKGGGSGGGSGGGSGGGQVQLVESGGGVVQPGRSLRLSCAASGFTFSSYTMHWVRQAPGKGLEWVTFISYDGNNKYYADSVKGRFTISRDNSKNTLYLQMNSLRAEDTAIYYCARTGWLGPFDYWGQGTLVTVSSLNPLINEISKIISAAGNFDVKEERAAASLLQLSGNASDFSYGRNSITLTASA

SEQ ID NO: 792 - DNA, 5309 bp, Artificial Sequence
  source: /note="Description of Artificial Sequence: Synthetic polynucleotide"
  source: /note="anti CTLA-4 scFv"
gaattcgttaagacccactttcacatttaagttgtttttctaatccgcatatgatcaattcaaggccgaataagaaggctggctctgcaccttggtgatcaaataattcgatagcttgtcgtaataatggcggcatactatcagtagtaggtgtttccctttcttctttagcgacttgatgctcttgatcttccaatacgcaacctaaagtaaaatgccccacagcgctgagtgcatataatgcattctctagtgaaaaaccttgttggcataaaaaggctaattgattttcgagagtttcatactgtttttctgtaggccgtgtacctaaatgtacttttgctccatcgcgatgacttagtaaagcacatctaaaacttttagcgttattacgtaaaaaatcttgccagctttccccttctaaagggcaaaagtgagtatggtgcctatctaacatctcaatggctaaggcgtcgagcaaagcccgcttattttttacatgccaatacaatgtaggctgctctacacctagcttctgggcgagtttacgggttgttaaaccttcgattccgacctcattaagcagctctaatgcgctgttaatcactttacttttatctaatctagacatcattaattcctaatttttgttgacactctatcatttatagagttaatttaccactccctatcagtgatagagaaaagtgaatcacaacgctgagagagagagaaatatggaaattgtactgacccagtcgcctggtaccctgtctctgtcgccgggtgaacgtgctaccctgtcttgtcgtgcttcgcaatcggttggctcgtcttatctggcatggtatcagcaaaaaccgggccaagcgcctcgtctgctgatttatggcgcgttttctcgtgctacgggcattcctgatcgtttttcgggctctggctctggtactgattttacgctgactatcagccgcttggaacctgaagattttgcggtttattattgccaacaatatggctcttctccgtggacgtttggtcaaggcactaaagttgaaattaaaggtggtggctcgggcggtggttctggtggtggtagtggtggtggtcaagtgcagttggttgaatcgggtggcggtgttgtgcagccgggccgttcgttgcgtctgtcttgcgcagcgagtggtttcaccttctcttcttatactatgcactgggtgcgtcaagcacctggcaaaggtctggagtgggtaacttttatttcatacgatggtaataataaatattatgcagattctgttaaaggtcgctttacgatttctcgcgataattcaaaaaatacgctgtatctgcagatgaattcgctgcgcgctgaggatactgcgatctactattgtgcgcgtactggttggctgggtccgtttgattactggggccaaggtacgctggttacagtttcgtcgcttaatccattaattaatgaaatcagcaaaatcatttcagctgcaggtaattttgatgttaaagaggaaagagctgcagcttctttattgcagttgtccggtaatgccagtgatttttcatatggacggaactcaataactttgacagcatcagcataatttattaatttaaataatagcaatcttactgggctgtgccacataagattgctatttttttggagtcataatggattcttgtcataaaattgattatgggttatacgccctggagattttagcccaataccataacgtctctgttaacccggaagaaattaaacatagatttgacacagacgggactggtctgggattaacgtcatggttgcttgctgcgaaatctttagaactaaaggtaaaacaggtaaaaaaaacaattgaccgattaaactttatttctttgcccgcattagtctggagagaggatggacgtcattttattctgactaaagtcagtaaagaagcaaacagatatcttatttttgatctggagcaacgaaatccccgtgttctcgaacagtctgagtttgaggcgttatatcaggggcatattattcttattgcttcccgttcttctgttaccgggaaactggcaaaatttgactttacctggtttatccctgccattataaaatacagaaaaatatttattgaaacccttgttgtatctgtttttttacaattatttgcattaataaccccccttttttttcaggtggttatggacaaagtattagtacacagggggttttcaacccttaatgttattactgtcgcattatctgttgtggtggtgtttgagattatactcagcggtttaagaacttacatttttgcacatagtacaagtcggattgatgttgagttgggtgccaaactcttccggcatttactggcgctaccgatctcttattttgagagtcgtcgtgttggtgatactgttgccagggtaagagaattagaccagatccgtaattttctgacaggacaggcattaacatctgttctggacttattattttcattcatattttttgcggtaatgtggtattacagcccaaagcttactctggtgatcttattttcgctgccctgttatgctgcatggtctgtttttattagccccattttgcgacgtcgccttgatgataagttttcacggaatgcggataatcaatctttcctggtggaatcagtcacggcgattaacactataaaagctatggcagtctcacctcagatgacgaacatatgggacaaacaattggcaggatatgttgctgcaggctttaaagtgacagtattagccaccattggtcaacaaggaatacagttaatacaaaagactgttatgatcatcaacctgtggttgggagcacacctggttatttccggggatttaagtattggtcagttaattgcttttaatatgcttgctggtcagattgttgcaccggttattcgccttgcacaaatctggcaggatttccagcaggttggtatatcagttacccgccttggtgatgtgcttaactctccaactgaaagttatcatgggaaactggcattaccggaaattaatggtaatatcacttttcgtaatatccggtttcgctataagcctgactctccggttattttagataatatcaatctcagtattaagcagggggaggttattggtattgtcggacgttctggttcaggaaaaagcacattaactaaattaattcaacgtttttatattcctgaaaatggccaggtcttaattgatggacatgatcttgcgttggccgatcctaactggttacgtcgtcaggtgggggttgtgttgcaggacaatgtgctgcttaatcgcagtattattgataatatctcactggctaatcctggtatgtccgtcgaaaaagttatttatgcagcgaaattagcaggcgctcatgattttatttctgaattgcgtgaggggtataacaccattgtcggggaacagggggcaggattatccggaggtcaacgtcaacgcatcgcaattgcaagggcgctggtgaacaaccctaaaatacttatttttgatgaagcaaccagtgctctggattatgagtcggagcatatcatcatgcgcaatatgcacaaaatatgtaagggcagaacggttataatcattgctcatcgtctgtctacagtaaaaaatgcagaccgcattattgtcatggaaaaagggaaaattgttgaacagggtaaacataaggaactgctttctgaaccggaaagtttatacagttacttatatcagttacagtcagactaacagaaagaacagaagaatatgaaaacatggttaatggggttcagcgagttcctgttgcgctataaacttgtctggagtgaaacatggaaaatccggaagcaattagatactccggtacgtgaaaaggacgaaaatgaattcttacccgctcatctggaattaattgaaacgccggtatccagacggccgcgtctggttgcttattttattatggggtttctggttattgctgtcattttatctgttttaggtcaggtggaaattgttgccactgcaaatgggaaattaacactaagtgggcgcagcaaagaaattaaacctattgaaaactcaatagttaaagaaattatcgtaaaagaaggagagtcagtccggaaaggggatgtgttattaaagcttacagcactgggagctgaagctgatacgttaaaaacacagtcatcactgttacagaccaggctggaacaaactcggtatcaaattctgagcaggtcaattgaattaaataaactacctgaactgaagcttcctgatgagccttattttcagaatgtatctgaagaggaagtactgcgtttaacttctttgataaaagaacagttttccacatggcaaaatcagaagtatcaaaaagaactgaatctggataagaaaagagcagagcgattaacaatacttgcccgtataaaccgttatgaaaatttatcgagagttgaaaaaagccgtctggatgatttcaggagtttattgcataaacaggcaattgcaaaacatgctgtacttgagcaggagaataaatatgtcgaggcagcaaatgaattacgggtttataaatcgcaactggagcaaattgagagtgagatattgtctgcaaaagaagaatatcagcttgtcacgcagctttttaaaaatgaaattttagacaagctaagacaaacaacagacaacattgagttattaactctggagttagagaaaaatgaagagcgtcaacaggcttcagtaatcagggcccctgtttcgggaaaagttcagcaactgaaggttcatactgaaggtggggttgttacaacagcggaaacactgatggtcatcgttccggaagatgacacgctggaggttactgctctggtacaaaataaagatattggttttattaacgtcgggcagaatgccatcattaaagtggaggcctttccttacacccgatatggttatctggtgggtaaggtgaaaaatataaatttagatgcaatagaagaccagaaactgggactcgtttttaatgtcattgtttctgttgaagagaatgatttgtcaaccgggaataagcacattccattaagctcgggtatggctgtcactgcagaaataaagactggaatgcgaagcgtaatcagctatcttcttagtcctctggaagagtctgtaacagaaagtttacatgagcgttaagtctcagagccgcggtatccggctcatatcttctcctg

SEQ ID NO: 793 - protein, 288 aa, Artificial Sequence
  source: /note="Description of Artificial Sequence: Synthetic polypeptide"
  source: /note="anti PD-1 scFv"
MQVQLVESGGGVVQPGRSLRLDCKASGITFSNSGMHWVRQAPGKGLEWVAVIWYDGSKRYYADSVKGRFTISRDNSKNTLFLQMNSLRAEDTAVYYCATNDDYWGQGTLVTVSSGGGSGGGSGGGSGGGEIVLTQSPATLSLSPGERATLSCRASQSVSSYLAWYQQKPGQAPRLLIYDASNRATGIPARFSGSGSGTDFTLTISSLEPEDFAVYYCQQSSNWPRTFGQGTKVEIKLNPLINEISKIISAAGNFDVKEERAAASLLQLSGNASDFSYGRNSITLTASA

SEQ ID NO: 794 - DNA, 5291 bp, Artificial Sequence
  source: /note="Description of Artificial Sequence: Synthetic polynucleotide"
  source: /note="anti PD-1 scFv"
gaattcgttaagacccactttcacatttaagttgtttttctaatccgcatatgatcaattcaaggccgaataagaaggctggctctgcaccttggtgatcaaataattcgatagcttgtcgtaataatggcggcatactatcagtagtaggtgtttccctttcttctttagcgacttgatgctcttgatcttccaatacgcaacctaaagtaaaatgccccacagcgctgagtgcatataatgcattctctagtgaaaaaccttgttggcataaaaaggctaattgattttcgagagtttcatactgtttttctgtaggccgtgtacctaaatgtacttttgctccatcgcgatgacttagtaaagcacatctaaaacttttagcgttattacgtaaaaaatcttgccagctttccccttctaaagggcaaaagtgagtatggtgcctatctaacatctcaatggctaaggcgtcgagcaaagcccgcttattttttacatgccaatacaatgtaggctgctctacacctagcttctgggcgagtttacgggttgttaaaccttcgattccgacctcattaagcagctctaatgcgctgttaatcactttacttttatctaatctagacatcattaattcctaatttttgttgacactctatcatttatagagttaatttaccactccctatcagtgatagagaaaagtgaagttaaattgaggaggaggcagttccatgcaagtacaactggttgaatccggcggaggagtggtgcaaccgggccgcagtttgcgtctggattgtaaagcttcaggcatcactttttctaattctggtatgcactgggttcgccaagctccgggtaaaggtctggagtgggttgcggtgatctggtatgatggttctaaacgatattatgcggatagtgttaagggtcgttttactatttctcgtgataattctaagaacaccttgtttctgcagatgaatagtctgcgcgctgaggatactgcggtatattattgtgcgactaatgacgattattggggccaaggcacgctggttaccgtgagctctggtggtggttcgggtggtggttctggtggtgggagcggcggtggcgagatcgttctgactcaaagcccggcgactctgagtctgagtccgggtgaacgtgcgactctgagctgccgtgcgtctcagagtgtgtcgagttatctggcgtggtaccaacaaaaaccgggccaggcgccgcgactgctgatttatgatgcttctaatcgtgcgactggtattccggcgcgctttagcggttctggctcaggcactgacttcactctgactatttcttcgctggaaccggaagattttgcggtgtactattgtcaacaatcatctaattggcctcgtacgttcggtcaaggtacaaaagtggagataaaacttaatccattaattaatgaaatcagcaaaatcatttcagctgcaggtaattttgatgttaaagaggaaagagctgcagcttctttattgcagttgtccggtaatgccagtgatttttcatatggacggaactcaataactttgacagcatcagcataatttattaatttaaataatagcaatcttactgggctgtgccacataagattgctatttttttggagtcataatggattcttgtcataaaattgattatgggttatacgccctggagattttagcccaataccataacgtctctgttaacccggaagaaattaaacatagatttgacacagacgggactggtctgggattaacgtcatggttgcttgctgcgaaatctttagaactaaaggtaaaacaggtaaaaaaaacaattgaccgattaaactttatttctttgcccgcattagtctggagagaggatggacgtcattttattctgactaaagtcagtaaagaagcaaacagatatcttatttttgatctggagcaacgaaatccccgtgttctcgaacagtctgagtttgaggcgttatatcaggggcatattattcttattgcttcccgttcttctgttaccgggaaactggcaaaatttgactttacctggtttatccctgccattataaaatacagaaaaatatttattgaaacccttgttgtatctgtttttttacaattatttgcattaataaccccccttttttttcaggtggttatggacaaagtattagtacacagggggttttcaacccttaatgttattactgtcgcattatctgttgtggtggtgtttgagattatactcagcggtttaagaacttacatttttgcacatagtacaagtcggattgatgttgagttgggtgccaaactcttccggcatttactggcgctaccgatctcttattttgagagtcgtcgtgttggtgatactgttgccagggtaagagaattagaccagatccgtaattttctgacaggacaggcattaacatctgttctggacttattattttcattcatattttttgcggtaatgtggtattacagcccaaagcttactctggtgatcttattttcgctgccctgttatgctgcatggtctgtttttattagccccattttgcgacgtcgccttgatgataagttttcacggaatgcggataatcaatctttcctggtggaatcagtcacggcgattaacactataaaagctatggcagtctcacctcagatgacgaacatatgggacaaacaattggcaggatatgttgctgcaggctttaaagtgacagtattagccaccattggtcaacaaggaatacagttaatacaaaagactgttatgatcatcaacctgtggttgggagcacacctggttatttccggggatttaagtattggtcagttaattgcttttaatatgcttgctggtcagattgttgcaccggttattcgccttgcacaaatctggcaggatttccagcaggttggtatatcagttacccgccttggtgatgtgcttaactctccaactgaaagttatcatgggaaactggcattaccggaaattaatggtaatatcacttttcgtaatatccggtttcgctataagcctgactctccggttattttagataatatcaatctcagtattaagcagggggaggttattggtattgtcggacgttctggttcaggaaaaagcacattaactaaattaattcaacgtttttatattcctgaaaatggccaggtcttaattgatggacatgatcttgcgttggccgatcctaactggttacgtcgtcaggtgggggttgtgttgcaggacaatgtgctgcttaatcgcagtattattgataatatctcactggctaatcctggtatgtccgtcgaaaaagttatttatgcagcgaaattagcaggcgctcatgattttatttctgaattgcgtgaggggtataacaccattgtcggggaacagggggcaggattatccggaggtcaacgtcaacgcatcgcaattgcaagggcgctggtgaacaaccctaaaatacttatttttgatgaagcaaccagtgctctggattatgagtcggagcatatcatcatgcgcaatatgcacaaaatatgtaagggcagaacggttataatcattgctcatcgtctgtctacagtaaaaaatgcagaccgcattattgtcatggaaaaagggaaaattgttgaacagggtaaacataaggaactgctttctgaaccggaaagtttatacagttacttatatcagttacagtcagactaacagaaagaacagaagaatatgaaaacatggttaatggggttcagcgagttcctgttgcgctataaacttgtctggagtgaaacatggaaaatccggaagcaattagatactccggtacgtgaaaaggacgaaaatgaattcttacccgctcatctggaattaattgaaacgccggtatccagacggccgcgtctggttgcttattttattatggggtttctggttattgctgtcattttatctgttttaggtcaggtggaaattgttgccactgcaaatgggaaattaacactaagtgggcgcagcaaagaaattaaacctattgaaaactcaatagttaaagaaattatcgtaaaagaaggagagtcagtccggaaaggggatgtgttattaaagcttacagcactgggagctgaagctgatacgttaaaaacacagtcatcactgttacagaccaggctggaacaaactcggtatcaaattctgagcaggtcaattgaattaaataaactacctgaactgaagcttcctgatgagccttattttcagaatgtatctgaagaggaagtactgcgtttaacttctttgataaaagaacagttttccacatggcaaaatcagaagtatcaaaaagaactgaatctggataagaaaagagcagagcgattaacaatacttgcccgtataaaccgttatgaaaatttatcgagagttgaaaaaagccgtctggatgatttcaggagtttattgcataaacaggcaattgcaaaacatgctgtacttgagcaggagaataaatatgtcgaggcagcaaatgaattacgggtttataaatcgcaactggagcaaattgagagtgagatattgtctgcaaaagaagaatatcagcttgtcacgcagctttttaaaaatgaaattttagacaagctaagacaaacaacagacaacattgagttattaactctggagttagagaaaaatgaagagcgtcaacaggcttcagtaatcagggcccctgtttcgggaaaagttcagcaactgaaggttcatactgaaggtggggttgttacaacagcggaaacactgatggtcatcgttccggaagatgacacgctggaggttactgctctggtacaaaataaagatattggttttattaacgtcgggcagaatgccatcattaaagtggaggcctttccttacacccgatatggttatctggtgggtaaggtgaaaaatataaatttagatgcaatagaagaccagaaactgggactcgtttttaatgtcattgtttctgttgaagagaatgatttgtcaaccgggaataagcacattccattaagctcgggtatggctgtcactgcagaaataaagactggaatgcgaagcgtaatcagctatcttcttagtcctctggaagagtctgtaacagaaagtttacatgagcgttaagtctcagagccgcggtatccggctcatatcttctcctg

SEQ ID NO: 795 - protein, 288 aa, Artificial Sequence
  source: /note="Description of Artificial Sequence: Synthetic polypeptide"
  source: /note="anti PD-1 scFv"
MEIVLTQSPATLSLSPGERATLSCRASQSVSSYLAWYQQKPGQAPRLLIYDASNRATGIPARFSGSGSGTDFTLTISSLEPEDFAVYYCQQSSNWPRTFGQGTKVEIKGGGSGGGSGGGSGGGQVQLVESGGGVVQPGRSLRLDCKASGITFSNSGMHWVRQAPGKGLEWVAVIWYDGSKRYYADSVKGRFTISRDNSKNTLFLQMNSLRAEDTAVYYCATNDDYWGQGTLVTVSSLNPLINEISKIISAAGNFDVKEERAAASLLQLSGNASDFSYGRNSITLTASA

SEQ ID NO: 796 - DNA, 5291 bp, Artificial Sequence
  source: /note="Description of Artificial Sequence: Synthetic polynucleotide"
  source: /note="anti PD-1 scFv"
gaattcgttaagacccactttcacatttaagttgtttttctaatccgcatatgatcaattcaaggccgaataagaaggctggctctgcaccttggtgatcaaataattcgatagcttgtcgtaataatggcggcatactatcagtagtaggtgtttccctttcttctttagcgacttgatgctcttgatcttccaatacgcaacctaaagtaaaatgccccacagcgctgagtgcatataatgcattctctagtgaaaaaccttgttggcataaaaaggctaattgattttcgagagtttcatactgtttttctgtaggccgtgtacctaaatgtacttttgctccatcgcgatgacttagtaaagcacatctaaaacttttagcgttattacgtaaaaaatcttgccagctttccccttctaaagggcaaaagtgagtatggtgcctatctaacatctcaatggctaaggcgtcgagcaaagcccgcttattttttacatgccaatacaatgtaggctgctctacacctagcttctgggcgagtttacgggttgttaaaccttcgattccgacctcattaagcagctctaatgcgctgttaatcactttacttttatctaatctagacatcattaattcctaatttttgttgacactctatcatttatagagttaatttaccactccctatcagtgatagagaaaagtgaatataccgaacgcttaaggaggctttatggaaatcgtgctgactcagagtccggcgactctgtctctgagtccgggcgaacgcgcgactctgtcttgccgtgcgtctcaatctgtgtcttcatacttggcttggtaccaacaaaaaccgggccaggcgccgcgactgttgatttatgatgcgtcgaatcgcgcgactggcattccggcgcgcttttcgggtagcggttctggtactgattttacgctgactatctcttctctggagcctgaagatttcgctgtttattactgccaacagtctagtaattggccgcgtactttcggccagggcactaaggtggaaattaaaggtggcggctcgggcggcggctcgggtggtggttctggtggtggccaagtgcaactggtggaaagtggcggcggggtggtgcaaccgggccgttctctgcgcctggattgtaaagcttcaggcattacttttagcaactctggtatgcactgggttcgccaagctccgggcaaaggcctggaatgggtggcggttatttggtacgatggctctaaacgttattacgctgacagtgttaaaggccgctttaccatttctcgtgataattctaaaaataccctgtttctgcaaatgaactcgctgcgcgcggaagatactgctgtttactattgtgcgactaatgatgattactggggtcaaggtaccctggttaccgtgtcttctcttaatccattaattaatgaaatcagcaaaatcatttcagctgcaggtaattttgatgttaaagaggaaagagctgcagcttctttattgcagttgtccggtaatgccagtgatttttcatatggacggaactcaataactttgacagcatcagcataatttattaatttaaataatagcaatcttactgggctgtgccacataagattgctatttttttggagtcataatggattcttgtcataaaattgattatgggttatacgccctggagattttagcccaataccataacgtctctgttaacccggaagaaattaaacatagatttgacacagacgggactggtctgggattaacgtcatggttgcttgctgcgaaatctttagaactaaaggtaaaacaggtaaaaaaaacaattgaccgattaaactttatttctttgcccgcattagtctggagagaggatggacgtcattttattctgactaaagtcagtaaagaagcaaacagatatcttatttttgatctggagcaacgaaatccccgtgttctcgaacagtctgagtttgaggcgttatatcaggggcatattattcttattgcttcccgttcttctgttaccgggaaactggcaaaatttgactttacctggtttatccctgccattataaaatacagaaaaatatttattgaaacccttgttgtatctgtttttttacaattatttgcattaataaccccccttttttttcaggtggttatggacaaagtattagtacacagggggttttcaacccttaatgttattactgtcgcattatctgttgtggtggtgtttgagattatactcagcggtttaagaacttacatttttgcacatagtacaagtcggattgatgttgagttgggtgccaaactcttccggcatttactggcgctaccgatctcttattttgagagtcgtcgtgttggtgatactgttgccagggtaagagaattagaccagatccgtaattttctgacaggacaggcattaacatctgttctggacttattattttcattcatattttttgcggtaatgtggtattacagcccaaagcttactctggtgatcttattttcgctgccctgttatgctgcatggtctgtttttattagccccattttgcgacgtcgccttgatgataagttttcacggaatgcggataatcaatctttcctggtggaatcagtcacggcgattaacactataaaagctatggcagtctcacctcagatgacgaacatatgggacaaacaattggcaggatatgttgctgcaggctttaaagtgacagtattagccaccattggtcaacaaggaatacagttaatacaaaagactgttatgatcatcaacctgtggttgggagcacacctggttatttccggggatttaagtattggtcagttaattgcttttaatatgcttgctggtcagattgttgcaccggttattcgccttgcacaaatctggcaggatttccagcaggttggtatatcagttacccgccttggtgatgtgcttaactctccaactgaaagttatcatgggaaactggcattaccggaaattaatggtaatatcacttttcgtaatatccggtttcgctataagcctgactctccggttattttagataatatcaatctcagtattaagcagggggaggttattggtattgtcggacgttctggttcaggaaaaagcacattaactaaattaattcaacgtttttatattcctgaaaatggccaggtcttaattgatggacatgatcttgcgttggccgatcctaactggttacgtcgtcaggtgggggttgtgttgcaggacaatgtgctgcttaatcgcagtattattgataatatctcactggctaatcctggtatgtccgtcgaaaaagttatttatgcagcgaaattagcaggcgctcatgattttatttctgaattgcgtgaggggtataacaccattgtcggggaacagggggcaggattatccggaggtcaacgtcaacgcatcgcaattgcaagggcgctggtgaacaaccctaaaatacttatttttgatgaagcaaccagtgctctggattatgagtcggagcatatcatcatgcgcaatatgcacaaaatatgtaagggcagaacggttataatcattgctcatcgtctgtctacagtaaaaaatgcagaccgcattattgtcatggaaaaagggaaaattgttgaacagggtaaacataaggaactgctttctgaaccggaaagtttatacagttacttatatcagttacagtcagactaacagaaagaacagaagaatatgaaaacatggttaatggggttcagcgagttcctgttgcgctataaacttgtctggagtgaaacatggaaaatccggaagcaattagatactccggtacgtgaaaaggacgaaaatgaattcttacccgctcatctggaattaattgaaacgccggtatccagacggccgcgtctggttgcttattttattatggggtttctggttattgctgtcattttatctgttttaggtcaggtggaaattgttgccactgcaaatgggaaattaacactaagtgggcgcagcaaagaaattaaacctattgaaaactcaatagttaaagaaattatcgtaaaagaaggagagtcagtccggaaaggggatgtgttattaaagcttacagcactgggagctgaagctgatacgttaaaaacacagtcatcactgttacagaccaggctggaacaaactcggtatcaaattctgagcaggtcaattgaattaaataaactacctgaactgaagcttcctgatgagccttattttcagaatgtatctgaagaggaagtactgcgtttaacttctttgataaaagaacagttttccacatggcaaaatcagaagtatcaaaaagaactgaatctggataagaaaagagcagagcgattaacaatacttgcccgtataaaccgttatgaaaatttatcgagagttgaaaaaagccgtctggatgatttcaggagtttattgcataaacaggcaattgcaaaacatgctgtacttgagcaggagaataaatatgtcgaggcagcaaatgaattacgggtttataaatcgcaactggagcaaattgagagtgagatattgtctgcaaaagaagaatatcagcttgtcacgcagctttttaaaaatgaaattttagacaagctaagacaaacaacagacaacattgagttattaactctggagttagagaaaaatgaagagcgtcaacaggcttcagtaatcagggcccctgtttcgggaaaagttcagcaactgaaggttcatactgaaggtggggttgttacaacagcggaaacactgatggtcatcgttccggaagatgacacgctggaggttactgctctggtacaaaataaagatattggttttattaacgtcgggcagaatgccatcattaaagtggaggcctttccttacacccgatatggttatctggtgggtaaggtgaaaaatataaatttagatgcaatagaagaccagaaactgggactcgtttttaatgtcattgtttctgttgaagagaatgatttgtcaaccgggaataagcacattccattaagctcgggtatggctgtcactgcagaaataaagactggaatgcgaagcgtaatcagctatcttcttagtcctctggaagagtctgtaacagaaagtttacatgagcgttaagtctcagagccgcggtatccggctcatatcttctcctg

SEQ ID NO: 797 - protein, 294 aa, Artificial Sequence
  source: /note="Description of Artificial Sequence: Synthetic polypeptide"
  source: /note="anti PDL-1 scFv"
MEVQLVESGGGLVQPGGSLRLSCAASGFTFSDSWIHWVRQAPGKGLEWVAWISPYGGSTYYADSVKGRFTISADTSKNTAYLQMNSLRAEDTAVYYCARRHWPGGFDYWGQGTLVTVSSGGGSGGGSGGGSGGGDIQMTQSPSSLSASVGDRVTITCRASQDVSTAVAWYQQKPGKAPKLLIYSASFLYSGVPSRFSGSGSGTDFTLTISSLQPEDFATYYCQQYLYHPATFGQGTKVEIKRLNPLINEISKIISAAGNFDVKEERAAASLLQLSGNASDFSYGRNSITLTASA

SEQ ID NO: 798 - DNA, 5309 bp, Artificial Sequence
  source: /note="Description of Artificial Sequence: Synthetic polynucleotide"
  source: /note="anti PDL-1 scFv"
gaattcgttaagacccactttcacatttaagttgtttttctaatccgcatatgatcaattcaaggccgaataagaaggctggctctgcaccttggtgatcaaataattcgatagcttgtcgtaataatggcggcatactatcagtagtaggtgtttccctttcttctttagcgacttgatgctcttgatcttccaatacgcaacctaaagtaaaatgccccacagcgctgagtgcatataatgcattctctagtgaaaaaccttgttggcataaaaaggctaattgattttcgagagtttcatactgtttttctgtaggccgtgtacctaaatgtacttttgctccatcgcgatgacttagtaaagcacatctaaaacttttagcgttattacgtaaaaaatcttgccagctttccccttctaaagggcaaaagtgagtatggtgcctatctaacatctcaatggctaaggcgtcgagcaaagcccgcttattttttacatgccaatacaatgtaggctgctctacacctagcttctgggcgagtttacgggttgttaaaccttcgattccgacctcattaagcagctctaatgcgctgttaatcactttacttttatctaatctagacatcattaattcctaatttttgttgacactctatcatttatagagttaatttaccactccctatcagtgatagagaaaagtgaagatagggaccaggtaaggaggatgaatggaagtgcagctggtggagtcaggtggaggcttggtgcaaccgggcggttcactgcgtctgtcatgtgcggcgtctgggtttacttttagtgactcttggattcactgggtgcgccaggctccgggtaaaggcctggaatgggtagcttggattagtccttacggtggctcgacctattatgctgattcggtaaagggtcgctttactattagcgctgatacttctaaaaatactgcatacctgcagatgaatagcctgcgcgctgaggatactgctgtgtattattgcgcgcgtcgccactggccgggcggctttgattattggggccaaggtactctggttaccgtgtctagtggcggtggtagcggcggcggctcaggtggcggctcgggcggtggcgacattcagatgactcagtctccgtcttctttgtcggcgagcgtgggcgatcgtgttaccatcacgtgtcgcgcgagccaagatgtgtcgactgcggtggcttggtatcaacaaaaaccgggtaaagctccgaaactgctgatttatagtgcgtcttttttgtattctggtgttccgtctcgtttctctggctcaggtagcggtactgattttacgctgactatttcttcactgcaaccggaagattttgctacgtattattgtcaacaatatctgtatcacccggcgacgtttggtcagggtactaaggtggagataaaacgccttaatccattaattaatgaaatcagcaaaatcatttcagctgcaggtaattttgatgttaaagaggaaagagctgcagcttctttattgcagttgtccggtaatgccagtgatttttcatatggacggaactcaataactttgacagcatcagcataatttattaatttaaataatagcaatcttactgggctgtgccacataagattgctatttttttggagtcataatggattcttgtcataaaattgattatgggttatacgccctggagattttagcccaataccataacgtctctgttaacccggaagaaattaaacatagatttgacacagacgggactggtctgggattaacgtcatggttgcttgctgcgaaatctttagaactaaaggtaaaacaggtaaaaaaaacaattgaccgattaaactttatttctttgcccgcattagtctggagagaggatggacgtcattttattctgactaaagtcagtaaagaagcaaacagatatcttatttttgatctggagcaacgaaatccccgtgttctcgaacagtctgagtttgaggcgttatatcaggggcatattattcttattgcttcccgttcttctgttaccgggaaactggcaaaatttgactttacctggtttatccctgccattataaaatacagaaaaatatttattgaaacccttgttgtatctgtttttttacaattatttgcattaataaccccccttttttttcaggtggttatggacaaagtattagtacacagggggttttcaacccttaatgttattactgtcgcattatctgttgtggtggtgtttgagattatactcagcggtttaagaacttacatttttgcacatagtacaagtcggattgatgttgagttgggtgccaaactcttccggcatttactggcgctaccgatctcttattttgagagtcgtcgtgttggtgatactgttgccagggtaagagaattagaccagatccgtaattttctgacaggacaggcattaacatctgttctggacttattattttcattcatattttttgcggtaatgtggtattacagcccaaagcttactctggtgatcttattttcgctgccctgttatgctgcatggtctgtttttattagccccattttgcgacgtcgccttgatgataagttttcacggaatgcggataatcaatctttcctggtggaatcagtcacggcgattaacactataaaagctatggcagtctcacctcagatgacgaacatatgggacaaacaattggcaggatatgttgctgcaggctttaaagtgacagtattagccaccattggtcaacaaggaatacagttaatacaaaagactgttatgatcatcaacctgtggttgggagcacacctggttatttccggggatttaagtattggtcagttaattgcttttaatatgcttgctggtcagattgttgcaccggttattcgccttgcacaaatctggcaggatttccagcaggttggtatatcagttacccgccttggtgatgtgcttaactctccaactgaaagttatcatgggaaactggcattaccggaaattaatggtaatatcacttttcgtaatatccggtttcgctataagcctgactctccggttattttagataatatcaatctcagtattaagcagggggaggttattggtattgtcggacgttctggttcaggaaaaagcacattaactaaattaattcaacgtttttatattcctgaaaatggccaggtcttaattgatggacatgatcttgcgttggccgatcctaactggttacgtcgtcaggtgggggttgtgttgcaggacaatgtgctgcttaatcgcagtattattgataatatctcactggctaatcctggtatgtccgtcgaaaaagttatttatgcagcgaaattagcaggcgctcatgattttatttctgaattgcgtgaggggtataacaccattgtcggggaacagggggcaggattatccggaggtcaacgtcaacgcatcgcaattgcaagggcgctggtgaacaaccctaaaatacttatttttgatgaagcaaccagtgctctggattatgagtcggagcatatcatcatgcgcaatatgcacaaaatatgtaagggcagaacggttataatcattgctcatcgtctgtctacagtaaaaaatgcagaccgcattattgtcatggaaaaagggaaaattgttgaacagggtaaacataaggaactgctttctgaaccggaaagtttatacagttacttatatcagttacagtcagactaacagaaagaacagaagaatatgaaaacatggttaatggggttcagcgagttcctgttgcgctataaacttgtctggagtgaaacatggaaaatccggaagcaattagatactccggtacgtgaaaaggacgaaaatgaattcttacccgctcatctggaattaattgaaacgccggtatccagacggccgcgtctggttgcttattttattatggggtttctggttattgctgtcattttatctgttttaggtcaggtggaaattgttgccactgcaaatgggaaattaacactaagtgggcgcagcaaagaaattaaacctattgaaaactcaatagttaaagaaattatcgtaaaagaaggagagtcagtccggaaaggggatgtgttattaaagcttacagcactgggagctgaagctgatacgttaaaaacacagtcatcactgttacagaccaggctggaacaaactcggtatcaaattctgagcaggtcaattgaattaaataaactacctgaactgaagcttcctgatgagccttattttcagaatgtatctgaagaggaagtactgcgtttaacttctttgataaaagaacagttttccacatggcaaaatcagaagtatcaaaaagaactgaatctggataagaaaagagcagagcgattaacaatacttgcccgtataaaccgttatgaaaatttatcgagagttgaaaaaagccgtctggatgatttcaggagtttattgcataaacaggcaattgcaaaacatgctgtacttgagcaggagaataaatatgtcgaggcagcaaatgaattacgggtttataaatcgcaactggagcaaattgagagtgagatattgtctgcaaaagaagaatatcagcttgtcacgcagctttttaaaaatgaaattttagacaagctaagacaaacaacagacaacattgagttattaactctggagttagagaaaaatgaagagcgtcaacaggcttcagtaatcagggcccctgtttcgggaaaagttcagcaactgaaggttcatactgaaggtggggttgttacaacagcggaaacactgatggtcatcgttccggaagatgacacgctggaggttactgctctggtacaaaataaagatattggttttattaacgtcgggcagaatgccatcattaaagtggaggcctttccttacacccgatatggttatctggtgggtaaggtgaaaaatataaatttagatgcaatagaagaccagaaactgggactcgtttttaatgtcattgtttctgttgaagagaatgatttgtcaaccgggaataagcacattccattaagctcgggtatggctgtcactgcagaaataaagactggaatgcgaagcgtaatcagctatcttcttagtcctctggaagagtctgtaacagaaagtttacatgagcgttaagtctcagagccgcggtatccggctcatatcttctcctg

SEQ ID NO: 799 - protein, 294 aa, Artificial Sequence
  source: /note="Description of Artificial Sequence: Synthetic polypeptide"
  source: /note="anti PDL-1 scFv"
MDIQMTQSPSSLSASVGDRVTITCRASQDVSTAVAWYQQKPGKAPKLLIYSASFLYSGVPSRFSGSGSGTDFTLTISSLQPEDFATYYCQQYLYHPATFGQGTKVEIKRGGGSGGGSGGGSGGGEVQLVESGGGLVQPGGSLRLSCAASGFTFSDSWIHWVRQAPGKGLEWVAWISPYGGSTYYADSVKGRFTISADTSKNTAYLQMNSLRAEDTAVYYCARRHWPGGFDYWGQGTLVTVSSLNPLINEISKIISAAGNFDVKEERAAASLLQLSGNASDFSYGRNSITLTASA

SEQ ID NO: 800 - DNA, 5309 bp, Artificial Sequence
  source: /note="Description of Artificial Sequence: Synthetic polynucleotide"
  source: /note="anti PDL-1 scFv"
gaattcgttaagacccactttcacatttaagttgtttttctaatccgcatatgatcaattcaaggccgaataagaaggctggctctgcaccttggtgatcaaataattcgatagcttgtcgtaataatggcggcatactatcagtagtaggtgtttccctttcttctttagcgacttgatgctcttgatcttccaatacgcaacctaaagtaaaatgccccacagcgctgagtgcatataatgcattctctagtgaaaaaccttgttggcataaaaaggctaattgattttcgagagtttcatactgtttttctgtaggccgtgtacctaaatgtacttttgctccatcgcgatgacttagtaaagcacatctaaaacttttagcgttattacgtaaaaaatcttgccagctttccccttctaaagggcaaaagtgagtatggtgcctatctaacatctcaatggctaaggcgtcgagcaaagcccgcttattttttacatgccaatacaatgtaggctgctctacacctagcttctgggcgagtttacgggttgttaaaccttcgattccgacctcattaagcagctctaatgcgctgttaatcactttacttttatctaatctagacatcattaattcctaatttttgttgacactctatcatttatagagttaatttaccactccctatcagtgatagagaaaagtgaaataaatcccttcatgaggaggtaagatggatattcaaatgactcaatctccgagctctctgagtgcgtctgtgggtgatcgtgtgactattacttgtcgtgcgtctcaagatgtttcaactgcggttgcgtggtatcaacagaaaccgggcaaggcgcctaagctgctgatttattctgcttcgttcctgtacagcggtgtgccgtctcgtttctctggctctggttcgggtactgatttcactctgactatttcgagtctgcagccggaagattttgcgacttattattgtcaacaatatctgtatcaccctgcgacgtttggtcaaggcacgaaagttgaaattaaacgtggtggtggctctggtggtggcagcggtggtgggtcgggtggcggtgaagttcaactggttgagtcaggtggtggcctggtgcaaccgggcggctctctgcgcctgtcttgtgctgcgtcgggttttacgttctctgatagctggattcactgggtacgccaggcaccgggcaaaggtctggaatgggtagcttggatttcaccttatggtggctctacttattacgcggatagcgtgaaaggtcgctttactatttctgcggacactagcaaaaatactgcttacctgcaaatgaattcgctgcgtgctgaggatactgcagtgtattactgtgcgcgtcgtcattggcctggcggctttgattattggggtcaaggtactctggttactgttagcagccttaatccattaattaatgaaatcagcaaaatcatttcagctgcaggtaattttgatgttaaagaggaaagagctgcagcttctttattgcagttgtccggtaatgccagtgatttttcatatggacggaactcaataactttgacagcatcagcataatttattaatttaaataatagcaatcttactgggctgtgccacataagattgctatttttttggagtcataatggattcttgtcataaaattgattatgggttatacgccctggagattttagcccaataccataacgtctctgttaacccggaagaaattaaacatagatttgacacagacgggactggtctgggattaacgtcatggttgcttgctgcgaaatctttagaactaaaggtaaaacaggtaaaaaaaacaattgaccgattaaactttatttctttgcccgcattagtctggagagaggatggacgtcattttattctgactaaagtcagtaaagaagcaaacagatatcttatttttgatctggagcaacgaaatccccgtgttctcgaacagtctgagtttgaggcgttatatcaggggcatattattcttattgcttcccgttcttctgttaccgggaaactggcaaaatttgactttacctggtttatccctgccattataaaatacagaaaaatatttattgaaacccttgttgtatctgtttttttacaattatttgcattaataaccccccttttttttcaggtggttatggacaaagtattagtacacagggggttttcaacccttaatgttattactgtcgcattatctgttgtggtggtgtttgagattatactcagcggtttaagaacttacatttttgcacatagtacaagtcggattgatgttgagttgggtgccaaactcttccggcatttactggcgctaccgatctcttattttgagagtcgtcgtgttggtgatactgttgccagggtaagagaattagaccagatccgtaattttctgacaggacaggcattaacatctgttctggacttattattttcattcatattttttgcggtaatgtggtattacagcccaaagcttactctggtgatcttattttcgctgccctgttatgctgcatggtctgtttttattagccccattttgcgacgtcgccttgatgataagttttcacggaatgcggataatcaatctttcctggtggaatcagtcacggcgattaacactataaaagctatggcagtctcacctcagatgacgaacatatgggacaaacaattggcaggatatgttgctgcaggctttaaagtgacagtattagccaccattggtcaacaaggaatacagttaatacaaaagactgttatgatcatcaacctgtggttgggagcacacctggttatttccggggatttaagtattggtcagttaattgcttttaatatgcttgctggtcagattgttgcaccggttattcgccttgcacaaatctggcaggatttccagcaggttggtatatcagttacccgccttggtgatgtgcttaactctccaactgaaagttatcatgggaaactggcattaccggaaattaatggtaatatcacttttcgtaatatccggtttcgctataagcctgactctccggttattttagataatatcaatctcagtattaagcagggggaggttattggtattgtcggacgttctggttcaggaaaaagcacattaactaaattaattcaacgtttttatattcctgaaaatggccaggtcttaattgatggacatgatcttgcgttggccgatcctaactggttacgtcgtcaggtgggggttgtgttgcaggacaatgtgctgcttaatcgcagtattattgataatatctcactggctaatcctggtatgtccgtcgaaaaagttatttatgcagcgaaattagcaggcgctcatgattttatttctgaattgcgtgaggggtataacaccattgtcggggaacagggggcaggattatccggaggtcaacgtcaacgcatcgcaattgcaagggcgctggtgaacaaccctaaaatacttatttttgatgaagcaaccagtgctctggattatgagtcggagcatatcatcatgcgcaatatgcacaaaatatgtaagggcagaacggttataatcattgctcatcgtctgtctacagtaaaaaatgcagaccgcattattgtcatggaaaaagggaaaattgttgaacagggtaaacataaggaactgctttctgaaccggaaagtttatacagttacttatatcagttacagtcagactaacagaaagaacagaagaatatgaaaacatggttaatggggttcagcgagttcctgttgcgctataaacttgtctggagtgaaacatggaaaatccggaagcaattagatactccggtacgtgaaaaggacgaaaatgaattcttacccgctcatctggaattaattgaaacgccggtatccagacggccgcgtctggttgcttattttattatggggtttctggttattgctgtcattttatctgttttaggtcaggtggaaattgttgccactgcaaatgggaaattaacactaagtgggcgcagcaaagaaattaaacctattgaaaactcaatagttaaagaaattatcgtaaaagaaggagagtcagtccggaaaggggatgtgttattaaagcttacagcactgggagctgaagctgatacgttaaaaacacagtcatcactgttacagaccaggctggaacaaactcggtatcaaattctgagcaggtcaattgaattaaataaactacctgaactgaagcttcctgatgagccttattttcagaatgtatctgaagaggaagtactgcgtttaacttctttgataaaagaacagttttccacatggcaaaatcagaagtatcaaaaagaactgaatctggataagaaaagagcagagcgattaacaatacttgcccgtataaaccgttatgaaaatttatcgagagttgaaaaaagccgtctggatgatttcaggagtttattgcataaacaggcaattgcaaaacatgctgtacttgagcaggagaataaatatgtcgaggcagcaaatgaattacgggtttataaatcgcaactggagcaaattgagagtgagatattgtctgcaaaagaagaatatcagcttgtcacgcagctttttaaaaatgaaattttagacaagctaagacaaacaacagacaacattgagttattaactctggagttagagaaaaatgaagagcgtcaacaggcttcagtaatcagggcccctgtttcgggaaaagttcagcaactgaaggttcatactgaaggtggggttgttacaacagcggaaacactgatggtcatcgttccggaagatgacacgctggaggttactgctctggtacaaaataaagatattggttttattaacgtcgggcagaatgccatcattaaagtggaggcctttccttacacccgatatggttatctggtgggtaaggtgaaaaatataaatttagatgcaatagaagaccagaaactgggactcgtttttaatgtcattgtttctgttgaagagaatgatttgtcaaccgggaataagcacattccattaagctcgggtatggctgtcactgcagaaataaagactggaatgcgaagcgtaatcagctatcttcttagtcctctggaagagtctgtaacagaaagtttacatgagcgttaagtctcagagccgcggtatccggctcatatcttctcctg

SEQ ID NO: 801 - DNA, 104 bp, Artificial Sequence
  source: /note="Description of Artificial Sequence: Synthetic polynucleotide"
  source: /note="fliC promoter"
agcgggaataaggggcagagaaaagagtatttcgtcgactaacaaaaaatggctgtttgtgaaaaaaattctaaaggttgttttacgacagacgataacagggt

SEQ ID NO: 802 - DNA, 45 bp, Artificial Sequence
  source: /note="Description of Artificial Sequence: Synthetic oligonucleotide"
  source: /note="fliC 5 untranslated region"
tgacggcgattgagccgacgggtggaaacccaaaacgtaatcaac

SEQ ID NO: 803 - DNA, 96 bp, Artificial Sequence
  source: /note="Description of Artificial Sequence: Synthetic oligonucleotide"
  source: /note="Tetracycline responsive promoter"
atctaatctagacatcattaattcctaatttttgttgacactctatcattgatagagttattttaccactccctatcagtgatagagaaaagtgaa

SEQ ID NO: 804 - DNA, 705 bp, Artificial Sequence
  source: /note="Description of Artificial Sequence: Synthetic polynucleotide"
  source: /note="Tetracycline responsive promoter"
gaattcgttaagacccactttcacatttaagttgtttttctaatccgcatatgatcaattcaaggccgaataagaaggctggctctgcaccttggtgatcaaataattcgatagcttgtcgtaataatggcggcatactatcagtagtaggtgtttccctttcttctttagcgacttgatgctcttgatcttccaatacgcaacctaaagtaaaatgccccacagcgctgagtgcatataatgcattctctagtgaaaaaccttgttggcataaaaaggctaattgattttcgagagtttcatactgtttttctgtaggccgtgtacctaaatgtacttttgctccatcgcgatgacttagtaaagcacatctaaaacttttagcgttattacgtaaaaaatcttgccagctttccccttctaaagggcaaaagtgagtatggtgcctatctaacatctcaatggctaaggcgtcgagcaaagcccgcttattttttacatgccaatacaatgtaggctgctctacacctagcttctgggcgagtttacgggttgttaaaccttcgattccgacctcattaagcagctctaatgcgctgttaatcactttacttttatctaatctagacatcattaattcctaatttttgttgacactctatcatttatagagttaatttaccactccctatcagtgatagagaa

SEQ ID NO: 805 - DNA, 25 bp, Artificial Sequence
  source: /note="Description of Artificial Sequence: Synthetic oligonucleotide"
  source: /note="Optimized ribosome binding site"
aaataaaaatgaggaggcaattcta

SEQ ID NO: 806 - DNA, 25 bp, Artificial Sequence
  source: /note="Description of Artificial Sequence: Synthetic oligonucleotide"
  source: /note="Optimized ribosome binding site"
agattataaggagttaaatagaaaa

SEQ ID NO: 807 - DNA, 35 bp, Artificial Sequence
  source: /note="Description of Artificial Sequence: Synthetic oligonucleotide"
  source: /note="Optimized ribosome binding site"
ctcaaagaattataggaaaggaggaagcgataagt

SEQ ID NO: 808 - DNA, 25 bp, Artificial Sequence
  source: /note="Description of Artificial Sequence: Synthetic oligonucleotide"
  source: /note="Optimized ribosome binding site"
atcaccaatttgaggaaaggtaaat

SEQ ID NO: 809 - DNA, 25 bp, Artificial Sequence
  source: /note="Description of Artificial Sequence: Synthetic oligonucleotide"
  source: /note="Optimized ribosome binding site"
tggcagacgcctaaggaggaagacc

SEQ ID NO: 810 - DNA, 25 bp, Artificial Sequence
  source: /note="Description of Artificial Sequence: Synthetic oligonucleotide"
  source: /note="Optimized ribosome binding site"
tacataattttggggagggtactcg

SEQ ID NO: 811 - DNA, 25 bp, Artificial Sequence
  source: /note="Description of Artificial Sequence: Synthetic oligonucleotide"
  source: /note="Optimized ribosome binding site"
ttaaatatcaactagaggtcaccaa

SEQ ID NO: 812 - DNA, 25 bp, Artificial Sequence
  source: /note="Description of Artificial Sequence: Synthetic oligonucleotide"
  source: /note="Optimized ribosome binding site"
tacgatttaattcggaggttttttg

SEQ ID NO: 813 - DNA, 25 bp, Artificial Sequence
  source: /note="Description of Artificial Sequence: Synthetic oligonucleotide"
  source: /note="Optimized ribosome binding site"
tcacaacgctgagagagagagaaat

SEQ ID NO: 814 - DNA, 25 bp, Artificial Sequence
  source: /note="Description of Artificial Sequence: Synthetic oligonucleotide"
  source: /note="Optimized ribosome binding site"
gttaaattgaggaggaggcagttcc

SEQ ID NO: 815 - DNA, 25 bp, Artificial Sequence
  source: /note="Description of Artificial Sequence: Synthetic oligonucleotide"
  source: /note="Optimized ribosome binding site"
tataccgaacgcttaaggaggcttt

SEQ ID NO: 816 - DNA, 25 bp, Artificial Sequence
  source: /note="Description of Artificial Sequence: Synthetic oligonucleotide"
  source: /note="Optimized ribosome binding site"
ataaatcccttcatgaggaggtaag

SEQ ID NO: 817 - DNA, 25 bp, Artificial Sequence
  source: /note="Description of Artificial Sequence: Synthetic oligonucleotide"
  source: /note="Optimized ribosome binding site"
gatagggaccaggtaaggaggatga

SEQ ID NO: 818 - DNA, 200 bp, Artificial Sequence
  source: /note="Description of Artificial Sequence: Synthetic polynucleotide"
  source: /note="Terminator sequence"
tcgccgtaacctgattaactgagactgacggcaacgccaaattgcctgatgcgctgcgcttatcaggcctacaaggggaattgcaatttattgaatttgcacatttttgtaggccggataaggcgtttacgccgcatccggcaacatgaatggtaatttgccagcaacgtgcttccccgccaacggcggggttttttctg

SEQ ID NO: 819 - DNA, 96 bp, Artificial Sequence
  source: /note="Description of Artificial Sequence: Synthetic oligonucleotide"
  source: /note="Terminator sequence"
ctctaacggacttgagtgaggttgtaaagggagttggctcctcggtaccaaattccagaaaagaggcctcccgaaaggggggccttttttcgtttt

SEQ ID NO: 820 - DNA, 38 bp, Artificial Sequence
  source: /note="Description of Artificial Sequence: Synthetic oligonucleotide"
  source: /note="Terminator sequence"
gtctcagagccgcggtatccggctcatatcttctcctg

SEQ ID NO: 821 - DNA, 177 bp, Artificial Sequence
  source: /note="Description of Artificial Sequence: Synthetic polynucleotide"
  source: /note="N terminal secretion tag for Type V auto-secreter secretion"
atgaacaaagtatatagcctgaaatattgcccagtaactgggggtctgattgtagtcagtgaactggcatcccgcgtcatcaaaaaaacctgccgtcgtctgactcacatcctgctggcgggtattccggctgtgtatctgtactacccgcagatctcccaggcaggtatcgtccgc

SEQ ID NO: 822 - DNA, 921 bp, Artificial Sequence
  source: /note="Description of Artificial Sequence: Synthetic polynucleotide"
  source: /note="C terminal secretion tag for Type V auto-secreter secretion"
ttcaaagcggaggctgacaaggccgctgcagcaaaagctgactcctttatgaacgcgggttacaaaaacttcatgaccgaggtaaataatctcaataaacgtatgggtgatctgcgcgacactaatggggatgcaggcgcatgggcacgcattatgtctggtgcaggttcggcggatggcgggtattctgacaattacactcatgttcaggtgggcttcgataaaaaacatgagctggacggtgtggatctgttcactggcgtaaccatgacttatactgattcaagcgcagacagccacgcattttcaggtaaaacgaaatcagttggcggcggtctgtatgcgagcgcactgttcgagagcggcgcctacattgatctaattggcaagtatattcaccatgataatgattacacagggaactttgcaggcctgggcaccaaacactataacacgcattcatggtacgctggcgcagaaaccggctatagataccacctgaccgaggaaacctttatcgaaccgcaagcggaactggtttacggtgcggtcagtggcaagacctttcgttggaaagatggtgatatggatctgtcaatgaaaaaccgcgacttcagccccttgatcggccgcaccggcattgagctgggcaaaaccttctctggcaaagattggtctgttaccgcgcgtgcgggcacttcgtggcaatttgatctgctaaacaacggtgagactgtactgcgtgatgcgagtggcgaaaaacgtattaaaggtgaaaaagatagtagaatgctattcaacgtgggcatgaatgcgcagatcaaagataacatgcgttttgggttggagtttgaaaaatccgcgttcggtaaatataatgttgacaatgctgtgaacgcgaatttccgctacatgttttaa

SEQ ID NO: 823 - DNA, 729 bp, Artificial Sequence
  source: /note="Description of Artificial Sequence: Synthetic polynucleotide"
  source: /note="Anti-CTLA-4 single chain antibody coding region (Heavy Chain linker Light Chain)"
atgcaagtgcaactggtagagtccggtgggggcgtggtgcagccgggtcgcagcctgcgtctgtcgtgcgcggcgagtggttttacgttttcgagttatactatgcactgggttcgtcaagcgccgggcaaaggcctggaatgggttactttcatttcttacgatggtaataataaatattatgcggattctgtgaaaggtcgctttactatttcgcgcgataacagtaaaaacactctgtatctgcaaatgaattctctgcgtgcagaggatactgctatctattactgcgcgcgtacgggctggttgggcccgtttgattattggggccaaggcactttggttactgtgtcatcgggcgggggctctggcggtggttcaggtggtggcagtggtggtggcgagatcgtgttgactcaatctccgggtactctgtctctgtctccgggtgaacgcgcgaccctgtcttgccgcgcttctcagagtgttggttcatcgtatctggcatggtatcaacagaaaccgggtcaagcgccgcgtctgctgatttacggtgcttttagtcgcgcaaccgggattccggatcgattttctggttcaggttctggcactgactttactttgactattagtcgtctggaaccggaggacttcgcggtttattattgccaacagtatggttcttctccgtggacctttggtcaaggcactaaagttgaaattaaataa

SEQ ID NO: 824 - DNA, 729 bp, Artificial Sequence
  source: /note="Description of Artificial Sequence: Synthetic polynucleotide"
  source: /note="Anti-CTLA-4 single chain antibody coding region (Light Chain linker Heavy Chain)"
atggagattgtactgacccagagccctggtacattgtctttgtcgcctggtgaacgcgcgactctgtcttgtcgtgcgtctcagtctgttggtagttcgtatctggcgtggtatcaacaaaaaccgggccaagctccgcgtctgctgatttacggtgcatttagccgcgcgactggcattccggaccgcttttctgggtctggctcaggtaccgattttactctgactatttcgcgtctggagccggaggatttcgcggtttattactgccagcaatatggttctagtccgtggaccttcggccaaggtactaaagtggaaatcaaaggcgggggttcgggtggtggctctgggggtggctcgggcggtgggcaggtgcaactggttgagagtggtggcggcgttgttcaaccgggccgctctctgcgcctgtcgtgcgctgcttctggctttacctttagctcttatacgatgcactgggttcgccaagctccgggtaaaggtctggagtgggtgactttcatttcttacgatggtaacaacaaatattatgctgattctgttaaaggccgttttactatttctcgagacaatagcaaaaacactctgtacctgcagatgaattctctgcgcgctgaagacaccgcgatttattattgtgcgcgcactggttggctgggtccgtttgattattggggtcagggcacgctggttactgttagctcgtga

SEQ ID NO: 825 - DNA, 711 bp, Artificial Sequence
  source: /note="Description of Artificial Sequence: Synthetic polynucleotide"
  source: /note="Anti-PD-1 single chain antibody coding region (Heavy Chain linker Light Chain)"
atgcaggtgcaattggtggagtcgggtggcggcgtggtgcaaccgggtcgtagcctgcgcctggattgtaaagcgtcaggcatcacgtttagcaattctggcatgcactgggtgcgtcaagcgccgggcaaaggtctggagtgggttgcggtaatttggtacgatggttctaaacgctattacgcggatagtgtgaaaggtcgctttactatctctcgcgataattctaaaaacaccctgtttctgcaaatgaattcgttgcgtgcggaagatactgcggtatattattgtgctactaacgatgattattggggtcaaggcaccctggtgactgtttcgagcggcggtggtagcggcggcggctctggtggtggttctggtggcggtgagattgtgctgactcaaagcccggcgaccctgtctctgtcgccgggtgaacgcgctactctgagttgccgtgcgtcgcaaagcgtgtcttcttatctggcgtggtaccaacaaaaaccgggtcaagcgccgcgcctgctgatatatgatgctagtaatcgtgcaacgggtattccggcacgcttttcaggttctggcagcggcaccgatttcactctgactatctcgtcactggagccggaagactttgcggtttattattgtcagcaatcttctaattggccgcgtacgtttggtcagggcactaaagttgaaatcaaataa

SEQ ID NO: 826 - DNA, 711 bp, Artificial Sequence
  source: /note="Description of Artificial Sequence: Synthetic polynucleotide"
  source: /note="Anti-PD-1 single chain antibody coding region (Light Chain linker Heavy Chain)"
atggaaatcgttttaacgcagtcgccggcgactctgtctttgtcgcctggtgaacgtgctacgctgtcttgccgcgcgtcacagtctgtgtcgtcatatctggcttggtaccaacagaaaccgggccaagctccgcgcctgctgatttatgatgcgtctaatcgcgcgaccggcattccggcgcgtttttctggctccggctctggcaccgactttactctgactatttcgtctctggaaccggaagattttgcggtgtactattgccagcaatcttctaattggccgcgcacgtttggtcaaggtaccaaggttgagatcaaaggtggtggctcgggcggcggttcgggcggcggctcaggtggtggccaagttcagttggttgagtctggcgggggcgtagtacaaccgggtcgttctttgcgtctggattgcaaagcgagcggtattacctttagcaattcaggtatgcactgggtgcgccaagcgccgggcaaaggcctggaatgggttgcggtgatttggtacgatggctcgaaacgttattatgctgacagcgttaaaggtcgttttactattagccgtgataattccaaaaatacgctgtttctgcagatgaatagcctgcgtgctgaagacactgcggtttattactgtgctactaatgatgattactggggccagggcaccctggtgactgtgagttcttaa

SEQ ID NO: 827 - DNA, 729 bp, Artificial Sequence
  source: /note="Description of Artificial Sequence: Synthetic polynucleotide"
  source: /note="Anti-PD-L1 single chain antibody coding region (Light Chain linker Heavy Chain)"
atggatattcagatgactcagagccctagctcactgtctgcgtcagttggcgatcgtgtgactattacctgtcgcgctagtcaggatgtgtctacggcggttgcgtggtatcaacagaaaccgggcaaagctccgaaactgttgatttattcagcgtctttcctgtattcgggtgtgccttctcgcttttcgggctctggtagcggtactgattttacgctgactattagttcactgcaaccggaggactttgcgacttattattgccaacaatacctgtatcacccggcgacctttggtcaaggcactaaagtggaaattaaacgcggcggcggcagcggtggcggctctggtggtgggtctggtggtggtgaggttcagctggttgagtctggtggtggtctggttcaacctgggggcagcctgcgcctgtcgtgcgcggcgtctggttttacgttctcagattcttggattcactgggtacgtcaagctccgggcaaaggtctggagtgggtggcgtggatttctccgtatggcggttcgacgtattacgcggactctgttaaagggcgttttacgatctcagcggatacttctaaaaatactgcgtatctgcaaatgaattctctgcgagcggaggataccgcggtgtattactgtgctcgccgccactggcctggtggtttcgattattggggtcaaggtaccctggtgactgtttcgtcttaa

SEQ ID NO: 828 - DNA, 729 bp, Artificial Sequence
  source: /note="Description of Artificial Sequence: Synthetic polynucleotide"
  source: /note="Anti-PD-L1 single chain antibody coding region (Heavy Chain linker Light Chain)"
atggaagttcagctggtggagagtggtggcggtctggtgcagccgggcggctctctgcgtctgagctgtgcggcgtctggctttacgttttctgacagttggattcactgggtgcgccaagcaccgggcaaaggcctggagtgggtggcgtggatttctccgtatggcggtagtacttattatgctgattctgtgaaaggccgttttaccatttcggcggacacttcaaaaaataccgcgtatctgcaaatgaatagcctgcgcgctgaagacacggctgtttactactgtgctcgccgccactggccgggcggtttcgattattggggccaaggcactctggtgactgtgagctctggcggcgggtcgggtggcggttctggcggtggcagtggcggtggtgatattcaaatgacccaatctccgtcgtctctgagcgcgtctgtgggcgatcgtgtaaccattacttgtcgtgcgtcgcaggatgtgtctactgctgtggcgtggtatcagcaaaaaccgggtaaagctccgaaactgctgatttatagcgcttcttttctgtatagtggtgttccgtcacgttttagcggttcaggctctggtactgatttcacactgactatttcttctctgcaaccggaagatttcgcgacttattattgtcagcagtacttgtaccacccggcaacttttggtcagggcactaaagttgaaattaaacgttaa

SEQ ID NO: 829 - DNA, 1821 bp, Artificial Sequence
  source: /note="Description of Artificial Sequence: Synthetic polynucleotide"
  source: /note="Anti-CTLA-4 single chain antibody coding region (Heavy Chain linker Light Chain) with N terminal and C terminal Secretion Tag for Type V auto-secreter"
atgaacaaagtatatagcctgaaatattgcccagtaactgggggtctgattgtagtcagtgaactggcatcccgcgtcatcaaaaaaacctgccgtcgtctgactcacatcctgctggcgggtattccggctgtgtatctgtactacccgcagatctcccaggcaggtatcgtccgccaggtacaattagttgagagcggcggcggtgtggttcaaccgggccgtagtctgcgattgtcttgtgctgcatctggttttactttcagttcttacacgatgcactgggttcgccaagctccgggcaaaggcctggagtgggttacctttatttcttacgatggcaataataagtattacgctgattctgtgaaaggtcgctttactattagccgagataactctaaaaatactctgtatctgcaaatgaattctctgcgtgcggaagatactgcgatctattattgtgcgcgtactggttggctgggcccgtttgattattggggccaaggcacgctggttactgttagttcgggcggcggttctggtggcggctctggtggtggctctggcggcggcgagattgtgctgactcaatctccgggcacgctgtcactgtctccgggtgaacgcgcgaccctgtcttgtcgcgcgagtcaaagtgttggttcttcttatctggcttggtatcagcaaaagcctggtcaagcgccgcgtctgttgatttatggcgcgttttcgcgcgcgactggcattccggaccgattttctggttctggttctggcactgatttcactctgaccatttcacgcctggaaccggaggattttgcggtgtactattgccaacaatatggctcatcgccgtggacgtttggccaaggtactaaagttgagattaaattcaaagcggaggctgacaaggccgctgcagcaaaagctgactcctttatgaacgcgggttacaaaaacttcatgaccgaggtaaataatctcaataaacgtatgggtgatctgcgcgacactaatggggatgcaggcgcatgggcacgcattatgtctggtgcaggttcggcggatggcgggtattctgacaattacactcatgttcaggtgggcttcgataaaaaacatgagctggacggtgtggatctgttcactggcgtaaccatgacttatactgattcaagcgcagacagccacgcattttcaggtaaaacgaaatcagttggcggcggtctgtatgcgagcgcactgttcgagagcggcgcctacattgatctaattggcaagtatattcaccatgataatgattacacagggaactttgcaggcctgggcaccaaacactataacacgcattcatggtacgctggcgcagaaaccggctatagataccacctgaccgaggaaacctttatcgaaccgcaagcggaactggtttacggtgcggtcagtggcaagacctttcgttggaaagatggtgatatggatctgtcaatgaaaaaccgcgacttcagccccttgatcggccgcaccggcattgagctgggcaaaaccttctctggcaaagattggtctgttaccgcgcgtgcgggcacttcgtggcaatttgatctgctaaacaacggtgagactgtactgcgtgatgcgagtggcgaaaaacgtattaaaggtgaaaaagatagtagaatgctattcaacgtgggcatgaatgcgcagatcaaagataacatgcgttttgggttggagtttgaaaaatccgcgttcggtaaatataatgttgacaatgctgtgaacgcgaatttccgctacatgttttaa

SEQ ID NO: 830 - DNA, 1821 bp, Artificial Sequence
  source: /note="Description of Artificial Sequence: Synthetic polynucleotide"
  source: /note="Anti-CTLA-4 single chain antibody coding region (Light Chain linker Heavy Chain) with N terminal and C terminal Secretion Tag for Type V auto-secreter"
atgaacaaagtatatagcctgaaatattgcccagtaactgggggtctgattgtagtcagtgaactggcatcccgcgtcatcaaaaaaacctgccgtcgtctgactcacatcctgctggcgggtattccggctgtgtatctgtactacccgcagatctcccaggcaggtatcgtccgcgaaattgtactgacccagtcgcctggtaccctgtctctgtcgccgggtgaacgtgctaccctgtcttgtcgtgcttcgcaatcggttggctcgtcttatctggcatggtatcagcaaaaaccgggccaagcgcctcgtctgctgatttatggcgcgttttctcgtgctacgggcattcctgatcgtttttcgggctctggctctggtactgattttacgctgactatcagccgcttggaacctgaagattttgcggtttattattgccaacaatatggctcttctccgtggacgtttggtcaaggcactaaagttgaaattaaaggtggtggctcgggcggtggttctggtggtggtagtggtggtggtcaagtgcagttggttgaatcgggtggcggtgttgtgcagccgggccgttcgttgcgtctgtcttgcgcagcgagtggtttcaccttctcttcttatactatgcactgggtgcgtcaagcacctggcaaaggtctggagtgggtaacttttatttcatacgatggtaataataaatattatgcagattctgttaaaggtcgctttacgatttctcgcgataattcaaaaaatacgctgtatctgcagatgaattcgctgcgcgctgaggatactgcgatctactattgtgcgcgtactggttggctgggtccgtttgattactggggccaaggtacgctggttacagtttcgtcgttcaaagcggaggctgacaaggccgctgcagcaaaagctgactcctttatgaacgcgggttacaaaaacttcatgaccgaggtaaataatctcaataaacgtatgggtgatctgcgcgacactaatggggatgcaggcgcatgggcacgcattatgtctggtgcaggttcggcggatggcgggtattctgacaattacactcatgttcaggtgggcttcgataaaaaacatgagctggacggtgtggatctgttcactggcgtaaccatgacttatactgattcaagcgcagacagccacgcattttcaggtaaaacgaaatcagttggcggcggtctgtatgcgagcgcactgttcgagagcggcgcctacattgatctaattggcaagtatattcaccatgataatgattacacagggaactttgcaggcctgggcaccaaacactataacacgcattcatggtacgctggcgcagaaaccggctatagataccacctgaccgaggaaacctttatcgaaccgcaagcggaactggtttacggtgcggtcagtggcaagacctttcgttggaaagatggtgatatggatctgtcaatgaaaaaccgcgacttcagccccttgatcggccgcaccggcattgagctgggcaaaaccttctctggcaaagattggtctgttaccgcgcgtgcgggcacttcgtggcaatttgatctgctaaacaacggtgagactgtactgcgtgatgcgagtggcgaaaaacgtattaaaggtgaaaaagatagtagaatgctattcaacgtgggcatgaatgcgcagatcaaagataacatgcgttttgggttggagtttgaaaaatccgcgttcggtaaatataatgttgacaatgctgtgaacgcgaatttccgctacatgttttaa

SEQ ID NO: 831 - DNA, 1803 bp, Artificial Sequence
  source: /note="Description of Artificial Sequence: Synthetic polynucleotide"
  source: /note="Anti-PD-1 single chain antibody coding region (Heavy Chain linker  Light Chain) with N terminal and C terminal Secretion Tag for Type V auto-secreter"
atgaacaaagtatatagcctgaaatattgcccagtaactgggggtctgattgtagtcagtgaactggcatcccgcgtcatcaaaaaaacctgccgtcgtctgactcacatcctgctggcgggtattccggctgtgtatctgtactacccgcagatctcccaggcaggtatcgtccgccaagtacaactggttgaatccggcggaggagtggtgcaaccgggccgcagtttgcgtctggattgtaaagcttcaggcatcactttttctaattctggtatgcactgggttcgccaagctccgggtaaaggtctggagtgggttgcggtgatctggtatgatggttctaaacgatattatgcggatagtgttaagggtcgttttactatttctcgtgataattctaagaacaccttgtttctgcagatgaatagtctgcgcgctgaggatactgcggtatattattgtgcgactaatgacgattattggggccaaggcacgctggttaccgtgagctctggtggtggttcgggtggtggttctggtggtgggagcggcggtggcgagatcgttctgactcaaagcccggcgactctgagtctgagtccgggtgaacgtgcgactctgagctgccgtgcgtctcagagtgtgtcgagttatctggcgtggtaccaacaaaaaccgggccaggcgccgcgactgctgatttatgatgcttctaatcgtgcgactggtattccggcgcgctttagcggttctggctcaggcactgacttcactctgactatttcttcgctggaaccggaagattttgcggtgtactattgtcaacaatcatctaattggcctcgtacgttcggtcaaggtacaaaagtggagataaaattcaaagcggaggctgacaaggccgctgcagcaaaagctgactcctttatgaacgcgggttacaaaaacttcatgaccgaggtaaataatctcaataaacgtatgggtgatctgcgcgacactaatggggatgcaggcgcatgggcacgcattatgtctggtgcaggttcggcggatggcgggtattctgacaattacactcatgttcaggtgggcttcgataaaaaacatgagctggacggtgtggatctgttcactggcgtaaccatgacttatactgattcaagcgcagacagccacgcattttcaggtaaaacgaaatcagttggcggcggtctgtatgcgagcgcactgttcgagagcggcgcctacattgatctaattggcaagtatattcaccatgataatgattacacagggaactttgcaggcctgggcaccaaacactataacacgcattcatggtacgctggcgcagaaaccggctatagataccacctgaccgaggaaacctttatcgaaccgcaagcggaactggtttacggtgcggtcagtggcaagacctttcgttggaaagatggtgatatggatctgtcaatgaaaaaccgcgacttcagccccttgatcggccgcaccggcattgagctgggcaaaaccttctctggcaaagattggtctgttaccgcgcgtgcgggcacttcgtggcaatttgatctgctaaacaacggtgagactgtactgcgtgatgcgagtggcgaaaaacgtattaaaggtgaaaaagatagtagaatgctattcaacgtgggcatgaatgcgcagatcaaagataacatgcgttttgggttggagtttgaaaaatccgcgttcggtaaatataatgttgacaatgctgtgaacgcgaatttccgctacatgttttaa

SEQ ID NO: 832 - DNA, 1803 bp, Artificial Sequence
  source: /note="Description of Artificial Sequence: Synthetic polynucleotide"
  source: /note="Anti-PD-1 single chain antibody coding region (Light Chain linker Heavy Chain) with N terminal and C terminal Secretion Tag for Type V auto-secreter"
atgaacaaagtatatagcctgaaatattgcccagtaactgggggtctgattgtagtcagtgaactggcatcccgcgtcatcaaaaaaacctgccgtcgtctgactcacatcctgctggcgggtattccggctgtgtatctgtactacccgcagatctcccaggcaggtatcgtccgcgaaatcgtgctgactcagagtccggcgactctgtctctgagtccgggcgaacgcgcgactctgtcttgccgtgcgtctcaatctgtgtcttcatacttggcttggtaccaacaaaaaccgggccaggcgccgcgactgttgatttatgatgcgtcgaatcgcgcgactggcattccggcgcgcttttcgggtagcggttctggtactgattttacgctgactatctcttctctggagcctgaagatttcgctgtttattactgccaacagtctagtaattggccgcgtactttcggccagggcactaaggtggaaattaaaggtggcggctcgggcggcggctcgggtggtggttctggtggtggccaagtgcaactggtggaaagtggcggcggggtggtgcaaccgggccgttctctgcgcctggattgtaaagcttcaggcattacttttagcaactctggtatgcactgggttcgccaagctccgggcaaaggcctggaatgggtggcggttatttggtacgatggctctaaacgttattacgctgacagtgttaaaggccgctttaccatttctcgtgataattctaaaaataccctgtttctgcaaatgaactcgctgcgcgcggaagatactgctgtttactattgtgcgactaatgatgattactggggtcaaggtaccctggttaccgtgtcttctttcaaagcggaggctgacaaggccgctgcagcaaaagctgactcctttatgaacgcgggttacaaaaacttcatgaccgaggtaaataatctcaataaacgtatgggtgatctgcgcgacactaatggggatgcaggcgcatgggcacgcattatgtctggtgcaggttcggcggatggcgggtattctgacaattacactcatgttcaggtgggcttcgataaaaaacatgagctggacggtgtggatctgttcactggcgtaaccatgacttatactgattcaagcgcagacagccacgcattttcaggtaaaacgaaatcagttggcggcggtctgtatgcgagcgcactgttcgagagcggcgcctacattgatctaattggcaagtatattcaccatgataatgattacacagggaactttgcaggcctgggcaccaaacactataacacgcattcatggtacgctggcgcagaaaccggctatagataccacctgaccgaggaaacctttatcgaaccgcaagcggaactggtttacggtgcggtcagtggcaagacctttcgttggaaagatggtgatatggatctgtcaatgaaaaaccgcgacttcagccccttgatcggccgcaccggcattgagctgggcaaaaccttctctggcaaagattggtctgttaccgcgcgtgcgggcacttcgtggcaatttgatctgctaaacaacggtgagactgtactgcgtgatgcgagtggcgaaaaacgtattaaaggtgaaaaagatagtagaatgctattcaacgtgggcatgaatgcgcagatcaaagataacatgcgttttgggttggagtttgaaaaatccgcgttcggtaaatataatgttgacaatgctgtgaacgcgaatttccgctacatgttttaa

SEQ ID NO: 833 - DNA, 1821 bp, Artificial Sequence
  source: /note="Description of Artificial Sequence: Synthetic polynucleotide"
  source: /note="Anti-PD-L1 single chain antibody coding region (Light Chain linker Heavy Chain) with N terminal and C terminal Secretion Tag for Type V auto-secreter"
atgaacaaagtatatagcctgaaatattgcccagtaactgggggtctgattgtagtcagtgaactggcatcccgcgtcatcaaaaaaacctgccgtcgtctgactcacatcctgctggcgggtattccggctgtgtatctgtactacccgcagatctcccaggcaggtatcgtccgcgatattcaaatgactcaatctccgagctctctgagtgcgtctgtgggtgatcgtgtgactattacttgtcgtgcgtctcaagatgtttcaactgcggttgcgtggtatcaacagaaaccgggcaaggcgcctaagctgctgatttattctgcttcgttcctgtacagcggtgtgccgtctcgtttctctggctctggttcgggtactgatttcactctgactatttcgagtctgcagccggaagattttgcgacttattattgtcaacaatatctgtatcaccctgcgacgtttggtcaaggcacgaaagttgaaattaaacgtggtggtggctctggtggtggcagcggtggtgggtcgggtggcggtgaagttcaactggttgagtcaggtggtggcctggtgcaaccgggcggctctctgcgcctgtcttgtgctgcgtcgggttttacgttctctgatagctggattcactgggtacgccaggcaccgggcaaaggtctggaatgggtagcttggatttcaccttatggtggctctacttattacgcggatagcgtgaaaggtcgctttactatttctgcggacactagcaaaaatactgcttacctgcaaatgaattcgctgcgtgctgaggatactgcagtgtattactgtgcgcgtcgtcattggcctggcggctttgattattggggtcaaggtactctggttactgttagcagcttcaaagcggaggctgacaaggccgctgcagcaaaagctgactcctttatgaacgcgggttacaaaaacttcatgaccgaggtaaataatctcaataaacgtatgggtgatctgcgcgacactaatggggatgcaggcgcatgggcacgcattatgtctggtgcaggttcggcggatggcgggtattctgacaattacactcatgttcaggtgggcttcgataaaaaacatgagctggacggtgtggatctgttcactggcgtaaccatgacttatactgattcaagcgcagacagccacgcattttcaggtaaaacgaaatcagttggcggcggtctgtatgcgagcgcactgttcgagagcggcgcctacattgatctaattggcaagtatattcaccatgataatgattacacagggaactttgcaggcctgggcaccaaacactataacacgcattcatggtacgctggcgcagaaaccggctatagataccacctgaccgaggaaacctttatcgaaccgcaagcggaactggtttacggtgcggtcagtggcaagacctttcgttggaaagatggtgatatggatctgtcaatgaaaaaccgcgacttcagccccttgatcggccgcaccggcattgagctgggcaaaaccttctctggcaaagattggtctgttaccgcgcgtgcgggcacttcgtggcaatttgatctgctaaacaacggtgagactgtactgcgtgatgcgagtggcgaaaaacgtattaaaggtgaaaaagatagtagaatgctattcaacgtgggcatgaatgcgcagatcaaagataacatgcgttttgggttggagtttgaaaaatccgcgttcggtaaatataatgttgacaatgctgtgaacgcgaatttccgctacatgttttaa

SEQ ID NO: 834 - DNA, 1821 bp, Artificial Sequence
  source: /note="Description of Artificial Sequence: Synthetic polynucleotide"
  source: /note="Anti-PD-L1 single chain antibody coding region (Heavy Chain linker Light Chain) with N terminal and C terminal Secretion Tag for Type V auto-secreter"
atgaacaaagtatatagcctgaaatattgcccagtaactgggggtctgattgtagtcagtgaactggcatcccgcgtcatcaaaaaaacctgccgtcgtctgactcacatcctgctggcgggtattccggctgtgtatctgtactacccgcagatctcccaggcaggtatcgtccgcgaagtgcagctggtggagtcaggtggaggcttggtgcaaccgggcggttcactgcgtctgtcatgtgcggcgtctgggtttacttttagtgactcttggattcactgggtgcgccaggctccgggtaaaggcctggaatgggtagcttggattagtccttacggtggctcgacctattatgctgattcggtaaagggtcgctttactattagcgctgatacttctaaaaatactgcatacctgcagatgaatagcctgcgcgctgaggatactgctgtgtattattgcgcgcgtcgccactggccgggcggctttgattattggggccaaggtactctggttaccgtgtctagtggcggtggtagcggcggcggctcaggtggcggctcgggcggtggcgacattcagatgactcagtctccgtcttctttgtcggcgagcgtgggcgatcgtgttaccatcacgtgtcgcgcgagccaagatgtgtcgactgcggtggcttggtatcaacaaaaaccgggtaaagctccgaaactgctgatttatagtgcgtcttttttgtattctggtgttccgtctcgtttctctggctcaggtagcggtactgattttacgctgactatttcttcactgcaaccggaagattttgctacgtattattgtcaacaatatctgtatcacccggcgacgtttggtcagggtactaaggtggagataaaacgcttcaaagcggaggctgacaaggccgctgcagcaaaagctgactcctttatgaacgcgggttacaaaaacttcatgaccgaggtaaataatctcaataaacgtatgggtgatctgcgcgacactaatggggatgcaggcgcatgggcacgcattatgtctggtgcaggttcggcggatggcgggtattctgacaattacactcatgttcaggtgggcttcgataaaaaacatgagctggacggtgtggatctgttcactggcgtaaccatgacttatactgattcaagcgcagacagccacgcattttcaggtaaaacgaaatcagttggcggcggtctgtatgcgagcgcactgttcgagagcggcgcctacattgatctaattggcaagtatattcaccatgataatgattacacagggaactttgcaggcctgggcaccaaacactataacacgcattcatggtacgctggcgcagaaaccggctatagataccacctgaccgaggaaacctttatcgaaccgcaagcggaactggtttacggtgcggtcagtggcaagacctttcgttggaaagatggtgatatggatctgtcaatgaaaaaccgcgacttcagccccttgatcggccgcaccggcattgagctgggcaaaaccttctctggcaaagattggtctgttaccgcgcgtgcgggcacttcgtggcaatttgatctgctaaacaacggtgagactgtactgcgtgatgcgagtggcgaaaaacgtattaaaggtgaaaaagatagtagaatgctattcaacgtgggcatgaatgcgcagatcaaagataacatgcgttttgggttggagtttgaaaaatccgcgttcggtaaatataatgttgacaatgctgtgaacgcgaatttccgctacatgttttaa

SEQ ID NO: 835 - DNA, 885 bp, Artificial Sequence
  source: /note="Description of Artificial Sequence: Synthetic polynucleotide"
  source: /note="Anti-CTLA-4 single chain antibody coding region (Heavy Chain linker Light Chain) for type I hemolysin secretion, including HlyA tag"
atgcaggtacaattagttgagagcggcggcggtgtggttcaaccgggccgtagtctgcgattgtcttgtgctgcatctggttttactttcagttcttacacgatgcactgggttcgccaagctccgggcaaaggcctggagtgggttacctttatttcttacgatggcaataataagtattacgctgattctgtgaaaggtcgctttactattagccgagataactctaaaaatactctgtatctgcaaatgaattctctgcgtgcggaagatactgcgatctattattgtgcgcgtactggttggctgggcccgtttgattattggggccaaggcacgctggttactgttagttcgggcggcggttctggtggcggctctggtggtggctctggcggcggcgagattgtgctgactcaatctccgggcacgctgtcactgtctccgggtgaacgcgcgaccctgtcttgtcgcgcgagtcaaagtgttggttcttcttatctggcttggtatcagcaaaagcctggtcaagcgccgcgtctgttgatttatggcgcgttttcgcgcgcgactggcattccggaccgattttctggttctggttctggcactgatttcactctgaccatttcacgcctggaaccggaggattttgcggtgtactattgccaacaatatggctcatcgccgtggacgtttggccaaggtactaaagttgagattaaacttaatccattaattaatgaaatcagcaaaatcatttcagctgcaggtaattttgatgttaaagaggaaagagctgcagcttctttattgcagttgtccggtaatgccagtgatttttcatatggacggaactcaataactttgacagcatcagcataa

SEQ ID NO: 836 - DNA, 885 bp, Artificial Sequence
  source: /note="Description of Artificial Sequence: Synthetic polynucleotide"
  source: /note="Anti-CTLA-4 single chain antibody coding region (Light Chain linker Heavy Chain) for type I hemolysin secretion, including HlyA tag"
atggaaattgtactgacccagtcgcctggtaccctgtctctgtcgccgggtgaacgtgctaccctgtcttgtcgtgcttcgcaatcggttggctcgtcttatctggcatggtatcagcaaaaaccgggccaagcgcctcgtctgctgatttatggcgcgttttctcgtgctacgggcattcctgatcgtttttcgggctctggctctggtactgattttacgctgactatcagccgcttggaacctgaagattttgcggtttattattgccaacaatatggctcttctccgtggacgtttggtcaaggcactaaagttgaaattaaaggtggtggctcgggcggtggttctggtggtggtagtggtggtggtcaagtgcagttggttgaatcgggtggcggtgttgtgcagccgggccgttcgttgcgtctgtcttgcgcagcgagtggtttcaccttctcttcttatactatgcactgggtgcgtcaagcacctggcaaaggtctggagtgggtaacttttatttcatacgatggtaataataaatattatgcagattctgttaaaggtcgctttacgatttctcgcgataattcaaaaaatacgctgtatctgcagatgaattcgctgcgcgctgaggatactgcgatctactattgtgcgcgtactggttggctgggtccgtttgattactggggccaaggtacgctggttacagtttcgtcgcttaatccattaattaatgaaatcagcaaaatcatttcagctgcaggtaattttgatgttaaagaggaaagagctgcagcttctttattgcagttgtccggtaatgccagtgatttttcatatggacggaactcaataactttgacagcatcagcataa

SEQ ID NO: 837 - DNA, 867 bp, Artificial Sequence
  source: /note="Description of Artificial Sequence: Synthetic polynucleotide"
  source: /note="Anti-PD-1 single chain antibody coding region (Heavy Chain linker Light Chain) for type I hemolysin secretion, including HlyA tag"
atgcaagtacaactggttgaatccggcggaggagtggtgcaaccgggccgcagtttgcgtctggattgtaaagcttcaggcatcactttttctaattctggtatgcactgggttcgccaagctccgggtaaaggtctggagtgggttgcggtgatctggtatgatggttctaaacgatattatgcggatagtgttaagggtcgttttactatttctcgtgataattctaagaacaccttgtttctgcagatgaatagtctgcgcgctgaggatactgcggtatattattgtgcgactaatgacgattattggggccaaggcacgctggttaccgtgagctctggtggtggttcgggtggtggttctggtggtgggagcggcggtggcgagatcgttctgactcaaagcccggcgactctgagtctgagtccgggtgaacgtgcgactctgagctgccgtgcgtctcagagtgtgtcgagttatctggcgtggtaccaacaaaaaccgggccaggcgccgcgactgctgatttatgatgcttctaatcgtgcgactggtattccggcgcgctttagcggttctggctcaggcactgacttcactctgactatttcttcgctggaaccggaagattttgcggtgtactattgtcaacaatcatctaattggcctcgtacgttcggtcaaggtacaaaagtggagataaaacttaatccattaattaatgaaatcagcaaaatcatttcagctgcaggtaattttgatgttaaagaggaaagagctgcagcttctttattgcagttgtccggtaatgccagtgatttttcatatggacggaactcaataactttgacagcatcagcataa

SEQ ID NO: 838 - DNA, 867 bp, Artificial Sequence
  source: /note="Description of Artificial Sequence: Synthetic polynucleotide"
  source: /note="Anti-PD-1 single chain antibody coding region (Light Chain linker Heavy Chain) for type I hemolysin secretion, including HlyA tag"
atggaaatcgtgctgactcagagtccggcgactctgtctctgagtccgggcgaacgcgcgactctgtcttgccgtgcgtctcaatctgtgtcttcatacttggcttggtaccaacaaaaaccgggccaggcgccgcgactgttgatttatgatgcgtcgaatcgcgcgactggcattccggcgcgcttttcgggtagcggttctggtactgattttacgctgactatctcttctctggagcctgaagatttcgctgtttattactgccaacagtctagtaattggccgcgtactttcggccagggcactaaggtggaaattaaaggtggcggctcgggcggcggctcgggtggtggttctggtggtggccaagtgcaactggtggaaagtggcggcggggtggtgcaaccgggccgttctctgcgcctggattgtaaagcttcaggcattacttttagcaactctggtatgcactgggttcgccaagctccgggcaaaggcctggaatgggtggcggttatttggtacgatggctctaaacgttattacgctgacagtgttaaaggccgctttaccatttctcgtgataattctaaaaataccctgtttctgcaaatgaactcgctgcgcgcggaagatactgctgtttactattgtgcgactaatgatgattactggggtcaaggtaccctggttaccgtgtcttctcttaatccattaattaatgaaatcagcaaaatcatttcagctgcaggtaattttgatgttaaagaggaaagagctgcagcttctttattgcagttgtccggtaatgccagtgatttttcatatggacggaactcaataactttgacagcatcagcataa

SEQ ID NO: 839 - DNA, 885 bp, Artificial Sequence
  source: /note="Description of Artificial Sequence: Synthetic polynucleotide"
  source: /note="Anti-PD-L1 single chain antibody coding region (Light Chain linker Heavy Chain) for type I hemolysin secretion, including HlyA tag"
atggatattcaaatgactcaatctccgagctctctgagtgcgtctgtgggtgatcgtgtgactattacttgtcgtgcgtctcaagatgtttcaactgcggttgcgtggtatcaacagaaaccgggcaaggcgcctaagctgctgatttattctgcttcgttcctgtacagcggtgtgccgtctcgtttctctggctctggttcgggtactgatttcactctgactatttcgagtctgcagccggaagattttgcgacttattattgtcaacaatatctgtatcaccctgcgacgtttggtcaaggcacgaaagttgaaattaaacgtggtggtggctctggtggtggcagcggtggtgggtcgggtggcggtgaagttcaactggttgagtcaggtggtggcctggtgcaaccgggcggctctctgcgcctgtcttgtgctgcgtcgggttttacgttctctgatagctggattcactgggtacgccaggcaccgggcaaaggtctggaatgggtagcttggatttcaccttatggtggctctacttattacgcggatagcgtgaaaggtcgctttactatttctgcggacactagcaaaaatactgcttacctgcaaatgaattcgctgcgtgctgaggatactgcagtgtattactgtgcgcgtcgtcattggcctggcggctttgattattggggtcaaggtactctggttactgttagcagccttaatccattaattaatgaaatcagcaaaatcatttcagctgcaggtaattttgatgttaaagaggaaagagctgcagcttctttattgcagttgtccggtaatgccagtgatttttcatatggacggaactcaataactttgacagcatcagcataa

SEQ ID NO: 840 - DNA, 885 bp, Artificial Sequence
  source: /note="Description of Artificial Sequence: Synthetic polynucleotide"
  source: /note="Anti-PD-L1 single chain antibody coding region (Heavy Chain linker Light Chain) for type I hemolysin secretion, including HlyA tag"
atggaagtgcagctggtggagtcaggtggaggcttggtgcaaccgggcggttcactgcgtctgtcatgtgcggcgtctgggtttacttttagtgactcttggattcactgggtgcgccaggctccgggtaaaggcctggaatgggtagcttggattagtccttacggtggctcgacctattatgctgattcggtaaagggtcgctttactattagcgctgatacttctaaaaatactgcatacctgcagatgaatagcctgcgcgctgaggatactgctgtgtattattgcgcgcgtcgccactggccgggcggctttgattattggggccaaggtactctggttaccgtgtctagtggcggtggtagcggcggcggctcaggtggcggctcgggcggtggcgacattcagatgactcagtctccgtcttctttgtcggcgagcgtgggcgatcgtgttaccatcacgtgtcgcgcgagccaagatgtgtcgactgcggtggcttggtatcaacaaaaaccgggtaaagctccgaaactgctgatttatagtgcgtcttttttgtattctggtgttccgtctcgtttctctggctcaggtagcggtactgattttacgctgactatttcttcactgcaaccggaagattttgctacgtattattgtcaacaatatctgtatcacccggcgacgtttggtcagggtactaaggtggagataaaacgccttaatccattaattaatgaaatcagcaaaatcatttcagctgcaggtaattttgatgttaaagaggaaagagctgcagcttctttattgcagttgtccggtaatgccagtgatttttcatatggacggaactcaataactttgacagcatcagcataa

SEQ ID NO: 841 - DNA, 159 bp, Artificial Sequence; identical to SEQ ID NO: 754
  source: /note="Description of Artificial Sequence: Synthetic polynucleotide"
  source: /note="C terminal HlyA secretion Tag"

SEQ ID NO: 842 - DNA, 2124 bp, Artificial Sequence
  source: /note="Description of Artificial Sequence: Synthetic polynucleotide"
  source: /note="HlyB coding sequence"
atggattcttgtcataaaattgattatgggttatacgccctggagattttagcccaataccataacgtctctgttaacccggaagaaattaaacatagatttgacacagacgggactggtctgggattaacgtcatggttgcttgctgcgaaatctttagaactaaaggtaaaacaggtaaaaaaaacaattgaccgattaaactttatttctttgcccgcattagtctggagagaggatggacgtcattttattctgactaaagtcagtaaagaagcaaacagatatcttatttttgatctggagcaacgaaatccccgtgttctcgaacagtctgagtttgaggcgttatatcaggggcatattattcttattgcttcccgttcttctgttaccgggaaactggcaaaatttgactttacctggtttatccctgccattataaaatacagaaaaatatttattgaaacccttgttgtatctgtttttttacaattatttgcattaataaccccccttttttttcaggtggttatggacaaagtattagtacacagggggttttcaacccttaatgttattactgtcgcattatctgttgtggtggtgtttgagattatactcagcggtttaagaacttacatttttgcacatagtacaagtcggattgatgttgagttgggtgccaaactcttccggcatttactggcgctaccgatctcttattttgagagtcgtcgtgttggtgatactgttgccagggtaagagaattagaccagatccgtaattttctgacaggacaggcattaacatctgttctggacttattattttcattcatattttttgcggtaatgtggtattacagcccaaagcttactctggtgatcttattttcgctgccctgttatgctgcatggtctgtttttattagccccattttgcgacgtcgccttgatgataagttttcacggaatgcggataatcaatctttcctggtggaatcagtcacggcgattaacactataaaagctatggcagtctcacctcagatgacgaacatatgggacaaacaattggcaggatatgttgctgcaggctttaaagtgacagtattagccaccattggtcaacaaggaatacagttaatacaaaagactgttatgatcatcaacctgtggttgggagcacacctggttatttccggggatttaagtattggtcagttaattgcttttaatatgcttgctggtcagattgttgcaccggttattcgccttgcacaaatctggcaggatttccagcaggttggtatatcagttacccgccttggtgatgtgcttaactctccaactgaaagttatcatgggaaactggcattaccggaaattaatggtaatatcacttttcgtaatatccggtttcgctataagcctgactctccggttattttagataatatcaatctcagtattaagcagggggaggttattggtattgtcggacgttctggttcaggaaaaagcacattaactaaattaattcaacgtttttatattcctgaaaatggccaggtcttaattgatggacatgatcttgcgttggccgatcctaactggttacgtcgtcaggtgggggttgtgttgcaggacaatgtgctgcttaatcgcagtattattgataatatctcactggctaatcctggtatgtccgtcgaaaaagttatttatgcagcgaaattagcaggcgctcatgattttatttctgaattgcgtgaggggtataacaccattgtcggggaacagggggcaggattatccggaggtcaacgtcaacgcatcgcaattgcaagggcgctggtgaacaaccctaaaatacttatttttgatgaagcaaccagtgctctggattatgagtcggagcatatcatcatgcgcaatatgcacaaaatatgtaagggcagaacggttataatcattgctcatcgtctgtctacagtaaaaaatgcagaccgcattattgtcatggaaaaagggaaaattgttgaacagggtaaacataaggaactgctttctgaaccggaaagtttatacagttacttatatcagttacagtcagactaa

SEQ ID NO: 843 - DNA, 1437 bp, Artificial Sequence
  source: /note="Description of Artificial Sequence: Synthetic polynucleotide"
  source: /note="HlyD coding sequence"
atgaaaacatggttaatggggttcagcgagttcctgttgcgctataaacttgtctggagtgaaacatggaaaatccggaagcaattagatactccggtacgtgaaaaggacgaaaatgaattcttacccgctcatctggaattaattgaaacgccggtatccagacggccgcgtctggttgcttattttattatggggtttctggttattgctgtcattttatctgttttaggtcaggtggaaattgttgccactgcaaatgggaaattaacactaagtgggcgcagcaaagaaattaaacctattgaaaactcaatagttaaagaaattatcgtaaaagaaggagagtcagtccggaaaggggatgtgttattaaagcttacagcactgggagctgaagctgatacgttaaaaacacagtcatcactgttacagaccaggctggaacaaactcggtatcaaattctgagcaggtcaattgaattaaataaactacctgaactgaagcttcctgatgagccttattttcagaatgtatctgaagaggaagtactgcgtttaacttctttgataaaagaacagttttccacatggcaaaatcagaagtatcaaaaagaactgaatctggataagaaaagagcagagcgattaacaatacttgcccgtataaaccgttatgaaaatttatcgagagttgaaaaaagccgtctggatgatttcaggagtttattgcataaacaggcaattgcaaaacatgctgtacttgagcaggagaataaatatgtcgaggcagcaaatgaattacgggtttataaatcgcaactggagcaaattgagagtgagatattgtctgcaaaagaagaatatcagcttgtcacgcagctttttaaaaatgaaattttagacaagctaagacaaacaacagacaacattgagttattaactctggagttagagaaaaatgaagagcgtcaacaggcttcagtaatcagggcccctgtttcgggaaaagttcagcaactgaaggttcatactgaaggtggggttgttacaacagcggaaacactgatggtcatcgttccggaagatgacacgctggaggttactgctctggtacaaaataaagatattggttttattaacgtcgggcagaatgccatcattaaagtggaggcctttccttacacccgatatggttatctggtgggtaaggtgaaaaatataaatttagatgcaatagaagaccagaaactgggactcgtttttaatgtcattgtttctgttgaagagaatgatttgtcaaccgggaataagcacattccattaagctcgggtatggctgtcactgcagaaataaagactggaatgcgaagcgtaatcagctatcttcttagtcctctggaagagtctgtaacagaaagtttacatgagcgttaa

SEQ ID NO: 844 - protein, 119 aa, Artificial Sequence
  source: /note="Description of Artificial Sequence: Synthetic polypeptide"
  source: /note="Anti-CTLA-4 Heavy"
MQVQLVESGGGVVQPGRSLRLSCAASGFTFSSYTMHWVRQAPGKGLEWVTFISYDGNNKYYADSVKGRFTISRDNSKNTLYLQMNSLRAEDTAIYYCARTGWLGPFDYWGQGTLVTVSS

SEQ ID NO: 845 - protein, 108 aa, Artificial Sequence; identical to SEQ ID NO: 8
  source: /note="Description of Artificial Sequence: Synthetic polypeptide"
  source: /note="Anti-CTLA-4 Light"

SEQ ID NO: 846 - protein, 114 aa, Artificial Sequence
  source: /note="Description of Artificial Sequence: Synthetic polypeptide"
  source: /note="Anti-PD-1 Heavy"
MQVQLVESGGGVVQPGRSLRLDCKASGITFSNSGMHWVRQAPGKGLEWVAVIWYDGSKRYYADSVKGRFTISRDNSKNTLFLQMNSLRAEDTAVYYCATNDDYWGQGTLVTVSS

SEQ ID NO: 847 - protein, 107 aa, Artificial Sequence [sequence omitted]

SEQ ID NO: 848 - protein, 109 aa, Artificial Sequence
  source: /note="Description of Artificial Sequence: Synthetic polypeptide"
  source: /note="Anti-PD-L1 Light"
MDIQMTQSPSSLSASVGDRVTITCRASQDVSTAVAWYQQKPGKAPKLLIYSASFLYSGVPSRFSGSGSGTDFTLTISSLQPEDFATYYCQQYLYHPATFGQGTKVEIKR

SEQ ID NO: 849 - protein, 118 aa, Artificial Sequence [sequence omitted]

SEQ ID NO: 850 - protein, 15 aa, Artificial Sequence
  source: /note="Description of Artificial Sequence: Synthetic peptide"
  source: /note="Linker"
GGGSGGGSGGGSGGG

SEQ ID NO: 851 - protein, 59 aa, Artificial Sequence
  source: /note="Description of Artificial Sequence: Synthetic polypeptide"
  source: /note="N Terminal Secretion Tag For Type V Auto-secreter Secretion"
MNKVYSLKYCPVTGGLIVVSELASRVIKKTCRRLTHILLAGIPAVYLYYPQISQAGIVR

SEQ ID NO: 852 - protein, 162 aa, Artificial Sequence
  source: /note="Description of Artificial Sequence: Synthetic polypeptide"
  source: /note="C Terminal Secretion Tag For Type V Auto-secreter Secretion"
FKAEADKAAAAKADSFMNAGYKNFMTEVNNLNKRMGDLRDTNGDAGAWARIMSGAGSADGGYSDNYTHVQVGFDKKHELDGVDLFTGVTMTYTDSSADSHAFSGKTKSVGGGLYASALFESGAYIDLIGKYIHHDNDYTGNFAGLGTKHYNTHSWYAGAETG

SEQ ID NO: 853 - protein, 52 aa, Artificial Sequence; identical to SEQ ID NO: 753
  source: /note="Description of Artificial Sequence: Synthetic polypeptide"
  source: /note="C-Terminal HlyA Secretion Tag"

SEQ ID NO: 854 - protein, 707 aa, Artificial Sequence
  source: /note="Description of Artificial Sequence: Synthetic polypeptide"
  source: /note="HlyB"
MDSCHKIDYGLYALEILAQYHNVSVNPEEIKHRFDTDGTGLGLTSWLLAAKSLELKVKQVKKTIDRLNFISLPALVWREDGRHFILTKVSKEANRYLIFDLEQRNPRVLEQSEFEALYQGHIILIASRSSVTGKLAKFDFTWFIPAIIKYRKIFIETLVVSVFLQLFALITPLFFQVVMDKVLVHRGFSTLNVITVALSVVVVFEIILSGLRTYIFAHSTSRIDVELGAKLFRHLLALPISYFESRRVGDTVARVRELDQIRNFLTGQALTSVLDLLFSFIFFAVMWYYSPKLTLVILFSLPCYAAWSVFISPILRRRLDDKFSRNADNQSFLVESVTAINTIKAMAVSPQMTNIWDKQLAGYVAAGFKVTVLATIGQQGIQLIQKTVMIINLWLGAHLVISGDLSIGQLIAFNMLAGQIVAPVIRLAQIWQDFQQVGISVTRLGDVLNSPTESYHGKLALPEINGNITFRNIRFRYKPDSPVILDNINLSIKQGEVIGIVGRSGSGKSTLTKLIQRFYIPENGQVLIDGHDLALADPNWLRRQVGVVLQDNVLLNRSIIDNISLANPGMSVEKVIYAAKLAGAHDFISELREGYNTIVGEQGAGLSGGQRQRIAIARALVNNPKILIFDEATSALDYESEHIIMRNMHKICKGRTVIIIAHRLSTVKNADRIIVMEKGKIVEQGKHKELLSEPESLYSYLYQLQSD

SEQ ID NO: 855 - protein, 478 aa, Artificial Sequence
  source: /note="Description of Artificial Sequence: Synthetic polypeptide"
  source: /note="HlyD"
MKTWLMGFSEFLLRYKLVWSETWKIRKQLDTPVREKDENEFLPAHLELIETPVSRRPRLVAYFIMGFLVIAVILSVLGQVEIVATANGKLTLSGRSKEIKPIENSIVKEIIVKEGESVRKGDVLLKLTALGAEADTLKTQSSLLQTRLEQTRYQILSRSIELNKLPELKLPDEPYFQNVSEEEVLRLTSLIKEQFSTWQNQKYQKELNLDKKRAERLTILARINRYENLSRVEKSRLDDFRSLLHKQAIAKHAVLEQENKYVEAANELRVYKSQLEQIESEILSAKEEYQLVTQLFKNEILDKLRQTTDNIELLTLELEKNEERQQASVIRAPVSGKVQQLKVHTEGGVVTTAETLMVIVPEDDTLEVTALVQNKDIGFINVGQNAIIKVEAFPYTRYGYLVGKVKNINLDAIEDQKLGLVFNVIVSVEENDLSTGNKHIPLSSGMAVTAEIKTGMRSVISYLLSPLEESVTESLHER

SEQ ID NO: 856 - DNA, 213 bp, Artificial Sequence
  source: /note="Description of Artificial Sequence: Synthetic polynucleotide"
  source: /note="PfnrS"
ggtaccagttgttcttattggtggtgttgctttatggttgcatcgtagtaaatggttgtaacaaaagcaatttttccggctgtctgtatacaaaaacgccgtaaagtttgagcgaagtcaataaactctctacccattcagggcaatatctctcttggatccaaagtgaactctagaaataattttgtttaactttaagaaggagatatacat

SEQ ID NO: 857 - DNA, 1455 bp, Artificial Sequence
  source: /note="Description of Artificial Sequence: Synthetic polynucleotide"
  source: /note="PfnrS-nupC"
ggtaccagttgttcttattggtggtgttgctttatggttgcatcgtagtaaatggttgtaacaaaagcaatttttccggctgtctgtatacaaaaacgccgtaaagtttgagcgaagtcaataaactctctacccattcagggcaatatctctcttggatccaaagtgaactctagaaataattttgtttaactttaagaaggagatatacatgtgcacggaaatttaacctgcctcatatttggagcaaatatggaccgcgtccttcattttgtactggcacttgccgttgttgcgattctcgcactgctggtaagcagcgaccgcaaaaaaattcgtatccgttatgttattcaactgcttgttatcgaagtgttactggcgtggttcttcctgaactccgacgttggtctgggcttcgtgaaaggcttctccgaaatgttcgaaaaactgctcggttttgccaacgaagggactaacttcgtctttggtagcatgaatgatcaaggcctggcattcttcttcctgaaagtgctgtgcccaatcgtctttatctctgcgctgatcggtattctccagcatattcgcgtattgccggtgattatccgcgcaattggtttcctgctctccaaagtcaacggcatgggcaaactggaatcctttaacgccgtcagctccctgattctgggtcagtctgaaaactttattgcctataaagatatcctcggcaaaatctcccgcaatcgtatgtacaccatggcagcaacggcgatgtccaccgtgtcgatgtccatcgttggtgcatatatgaccatgctggagccgaaatacgtcgttgcggcgctggtactgaacatgttcagcacctttatcgtgctgtcgctgatcaacccttaccgtgttgatgccagtgaagaaaacattcagatgtccaacctgcacgaaggtcagagcttcttcgaaatgctgggtgaatacattctggcaggtttcaaagttgccattatcgttgccgcgatgctgatcggctttatcgccctgatcgctgcactgaacgctctgtttgctaccgtgactggctggtttggctacagcatctccttccagggcatcctgggttacatcttctatccgattgcatgggtgatgggtgttccttccagtgaagcactgcaagtgggcagtatcatggcgaccaaactggtttccaacgagttcgttgcgatgatggatctgcagaaaattgcttccacgctctctccgcgtgcggaaggcatcatctctgtgttcctggtttccttcgctaacttctcttcaatcgggattatcgcgggtgcggttaaaggcctgaatgaagagcaaggtaacgtggtttctcgcttcggtctgaaactggtttacggctctaccctggtgagtgtgctgtctgcgtcaatcgcagcactggtgctgtaa

SEQ ID NO: 858 - DNA, 3837 bp, Artificial Sequence
  source: /note="Description of Artificial Sequence: Synthetic polynucleotide"
  source: /note="PfnrS-xdhABC"
ggtaccagttgttcttattggtggtgttgctttatggttgcatcgtagtaaatggttgtaacaaaagcaatttttccggctgtctgtatacaaaaacgccgtaaagtttgagcgaagtcaataaactctctacccattcagggcaatatctctcttggatccaaagtgaactctagaaataattttgtttaactttaagaaggagatatacatatgcgcgtcgatgccattgctaaggtcaccgggcgggcacgatatactgacgattatattatggcgggcatgtgttacgcgaaatatgtacgtagccctatcgcacatggttatgctgtaaatattaatgatgaacaagccaggagtttgccgggcgtcctggcgatttttacctgggaagatgtgccagaaatcccattcgccacggcagggcatgcctggacacttgacgaaaacaagcgcgataccgccgatcgtgccctgctaacgcgtcatgttcgtcatcatggtgacgccgttgccatcgtcgtggcccgcgatgaactcacggcagaaaaagcggcgcaattggtcagcattgagtggcaagaattacccgttatcacctcgccagaagcggcgctggcagaagacgctgcaccaatccataacggtggcaatttactgaaacaaagcacgatgtcgacgggtaatgtccaacaaacaatcgatgccgccgactaccaggtacaggggcactatcagactcccgttattcaacattgtcatatggaaagcgtgacatcgctggcatggatggaggatgactcgcgaattaccatcgtttccagcacccagatcccgcacattgttcgccgcgtggttggtcaggcgctggatattccctggtcatgcgtacgagtcatcaaaccgtttatcggtggcggttttggtaataaacaggatgtactggaagagccaatggcggcattcctgaccagcaaacttggcggcattccggtgaaagtttcccttagccgtgaagagtgtttcctcgcaacccgtacccgccacgcttttactattgacgggcaaatgggcgtgaaccgcgacggaacattgaaaggttatagtctggatgttctgtctaacaccggcgcttatgcatctcacgggcactccattgcttctgctggggggaataaagtcgcttacctttatcctcgttgtgcctacgcttacagttcaaagacctgctataccaacctcccctcggctggtgcgatgcgtggttatggcgcgccacaagtcgtatttgccgttgagtctatgcttgatgatgccgcgacagcgttaggtattgatcctgttgaaattcgtttacgcaacgccgcccgcgaaggagatgctaatccgctcacgggaaaacgtatttacagcgcagggttgccggagtgtcttgaaaaaggccggaaaatctttgaatgggaaaaacgccgtgcagagtgccagaaccagcaaggcaatttacgtcgtggcgttggcgtcgcctgttttagctacacctctaacacctggcctgtcggcgtagaaatagcaggcgcgcgcctgttgatgaatcaggatggaaccatcaacgtgcaaagcggcgcgacggaaatcggccagggtgccgacaccgtgttctcgcaaatggtggcagaaaccgtgggagttccggtcagcgatgttcacgttatttcaacccaagataccgacgttacaccattcgaccccggcgcatttgcctcacgtcagagctatgttgccgcgcctgcgctgcgcagtgcagcactgttattaaaagagaaaatcatcgctcacgccgcagtcatgctacatcagtcagcgatgaatctgaccctgataaaaggccatatcgtgctgattgaaagaccggaagaaccgttaatgtcgttaaaagatttggcgatggacgctttctaccaccctgaacgcggcgggcagctctctgccgaaagctccatcaaaaccaccactaacccaccggcgtttggctgtacctttgttgatctgacggtcgatattgcactgtgcaaagtcaccatcaaccgcatcctcaacgttcatgattcgggccatattcttaatccgctgctggcagaaggtcaggtacacggcggaatgggaatgggcattggctgggcgctatttgaagagatgatcatcgatgcgaaaagcggcgtggtccgtaaccccaatctgctggattacaaaatgccgaccatgccggatctgccacaactggaaagcgcgttcgtcgaaatcaatgagccgcaatcagcatacggacataagtcactgggtgagccccccataattcctgtagccgctgctattcgtaacgcggtgaagatggctaccggtgttgcaatcaatacactgccgctaacgccaaaacgattatatgaagaattccatctggcaggattgatttgaggataacatcatgtttgattttgcttcttaccatcgcgcaaccacccttgccgatgccatcaccctgctggctgacaatccgcaggccaaattgcttgccggtggcactgacgtactgatacagcttcaccatcacaatgaccgctatcgccatattgttgatatccacaatctggcagagcttcagggaataacacaggcggaagatggcgcgctgcgaatcggctctgcgacaacatttactcagctcattgaagatcccgtaatccaacgcaatctcccggcgttatgtgctgcggctgcatcaatcgccgggccgcagatccgtaatgtcgccacctacggcggaaatatttgcaacggtgccaccagcgcagattctgccacgccaacgctaatttatgacgcgaaactggagctccactccccacgcggtgttcgtttcgtcccgattaatggctttcacaccgggccgggcaaagtgtctcttgagcatgacgaaatccttgtcgcctttcattttccgccacagccgaaagaacacgcgggcagcgcgcattttaaatatgccatgcgcgacgcaatggatatttcaacaattggctgcgccgcacattgccgactggataacggcaatttcagcgaattacgcctggcatttggtgttgccgcgccaacgccgattcgctgccaacatgccgaacagactgcacaaaatgcgccattaaacctgcaaacgctggaagccatcagcgaatcagtcctgcaagatgtcgccccgcgttcttcatggcgggccagtaaagagtttcgtctgcatctcatccagacgatgaccaaaaaagtgattagcgaagccgtcgccgcggcggggggaaaattgcaatgaatcacagcgaaacaattaccatcgaatgcaccattaacgggatgccttttcagcttcacgccgcgccaggaatgccgctttcggaactactccgagaacaagggcttcttagtgtcaaacaaggttgctgcgtaggcgaatgcggtgcctgtacggtgctggtcgacggcactgcgatagacagttgcttattccttgcgacctgggctgaaggaaaagagatccgcacgctggaaggtgaagcgaaaggcggtaaactttctcatgtccaactggcttatgcgaaatctggtgcagtgcaatgcgggttttgtacgccgggcctgattatggctaccacggcgatgctggcaaaaccacgcgaaaaaccattaaccattacggaaattcgtcgtggactggcgggaaatctttgtcgctgcacggggtatcagatgattgtaaatacagttctggattgcgagaaaacgaagtaa

SEQ ID NO: 859 - DNA, 3624 bp, Artificial Sequence
  source: /note="Description of Artificial Sequence: Synthetic polynucleotide"
  source: /note="xdhABC"
atgcgcgtcgatgccattgctaaggtcaccgggcgggcacgatatactgacgattatattatggcgggcatgtgttacgcgaaatatgtacgtagccctatcgcacatggttatgctgtaaatattaatgatgaacaagccaggagtttgccgggcgtcctggcgatttttacctgggaagatgtgccagaaatcccattcgccacggcagggcatgcctggacacttgacgaaaacaagcgcgataccgccgatcgtgccctgctaacgcgtcatgttcgtcatcatggtgacgccgttgccatcgtcgtggcccgcgatgaactcacggcagaaaaagcggcgcaattggtcagcattgagtggcaagaattacccgttatcacctcgccagaagcggcgctggcagaagacgctgcaccaatccataacggtggcaatttactgaaacaaagcacgatgtcgacgggtaatgtccaacaaacaatcgatgccgccgactaccaggtacaggggcactatcagactcccgttattcaacattgtcatatggaaagcgtgacatcgctggcatggatggaggatgactcgcgaattaccatcgtttccagcacccagatcccgcacattgttcgccgcgtggttggtcaggcgctggatattccctggtcatgcgtacgagtcatcaaaccgtttatcggtggcggttttggtaataaacaggatgtactggaagagccaatggcggcattcctgaccagcaaacttggcggcattccggtgaaagtttcccttagccgtgaagagtgtttcctcgcaacccgtacccgccacgcttttactattgacgggcaaatgggcgtgaaccgcgacggaacattgaaaggttatagtctggatgttctgtctaacaccggcgcttatgcatctcacgggcactccattgcttctgctggggggaataaagtcgcttacctttatcctcgttgtgcctacgcttacagttcaaagacctgctataccaacctcccctcggctggtgcgatgcgtggttatggcgcgccacaagtcgtatttgccgttgagtctatgcttgatgatgccgcgacagcgttaggtattgatcctgttgaaattcgtttacgcaacgccgcccgcgaaggagatgctaatccgctcacgggaaaacgtatttacagcgcagggttgccggagtgtcttgaaaaaggccggaaaatctttgaatgggaaaaacgccgtgcagagtgccagaaccagcaaggcaatttacgtcgtggcgttggcgtcgcctgttttagctacacctctaacacctggcctgtcggcgtagaaatagcaggcgcgcgcctgttgatgaatcaggatggaaccatcaacgtgcaaagcggcgcgacggaaatcggccagggtgccgacaccgtgttctcgcaaatggtggcagaaaccgtgggagttccggtcagcgatgttcacgttatttcaacccaagataccgacgttacaccattcgaccccggcgcatttgcctcacgtcagagctatgttgccgcgcctgcgctgcgcagtgcagcactgttattaaaagagaaaatcatcgctcacgccgcagtcatgctacatcagtcagcgatgaatctgaccctgataaaaggccatatcgtgctgattgaaagaccggaagaaccgttaatgtcgttaaaagatttggcgatggacgctttctaccaccctgaacgcggcgggcagctctctgccgaaagctccatcaaaaccaccactaacccaccggcgtttggctgtacctttgttgatctgacggtcgatattgcactgtgcaaagtcaccatcaaccgcatcctcaacgttcatgattcgggccatattcttaatccgctgctggcagaaggtcaggtacacggcggaatgggaatgggcattggctgggcgctatttgaagagatgatcatcgatgcgaaaagcggcgtggtccgtaaccccaatctgctggattacaaaatgccgaccatgccggatctgccacaactggaaagcgcgttcgtcgaaatcaatgagccgcaatcagcatacggacataagtcactgggtgagccccccataattcctgtagccgctgctattcgtaacgcggtgaagatggctaccggtgttgcaatcaatacactgccgctaacgccaaaacgattatatgaagaattccatctggcaggattgatttgaggataacatcatgtttgattttgcttcttaccatcgcgcaaccacccttgccgatgccatcaccctgctggctgacaatccgcaggccaaattgcttgccggtggcactgacgtactgatacagcttcaccatcacaatgaccgctatcgccatattgttgatatccacaatctggcagagcttcagggaataacacaggcggaagatggcgcgctgcgaatcggctctgcgacaacatttactcagctcattgaagatcccgtaatccaacgcaatctcccggcgttatgtgctgcggctgcatcaatcgccgggccgcagatccgtaatgtcgccacctacggcggaaatatttgcaacggtgccaccagcgcagattctgccacgccaacgctaatttatgacgcgaaactggagctccactccccacgcggtgttcgtttcgtcccgattaatggctttcacaccgggccgggcaaagtgtctcttgagcatgacgaaatccttgtcgcctttcattttccgccacagccgaaagaacacgcgggcagcgcgcattttaaatatgccatgcgcgacgcaatggatatttcaacaattggctgcgccgcacattgccgactggataacggcaatttcagcgaattacgcctggcatttggtgttgccgcgccaacgccgattcgctgccaacatgccgaacagactgcacaaaatgcgccattaaacctgcaaacgctggaagccatcagcgaatcagtcctgcaagatgtcgccccgcgttcttcatggcgggccagtaaagagtttcgtctgcatctcatccagacgatgaccaaaaaagtgattagcgaagccgtcgccgcggcggggggaaaattgcaatgaatcacagcgaaacaattaccatcgaatgcaccattaacgggatgccttttcagcttcacgccgcgccaggaatgccgctttcggaactactccgagaacaagggcttcttagtgtcaaacaaggttgctgcgtaggcgaatgcggtgcctgtacggtgctggtcgacggcactgcgatagacagttgcttattccttgcgacctgggctgaaggaaaagagatccgcacgctggaaggtgaagcgaaaggcggtaaactttctcatgtccaactggcttatgcgaaatctggtgcagtgcaatgcgggttttgtacgccgggcctgattatggctaccacggcgatgctggcaaaaccacgcgaaaaaccattaaccattacggaaattcgtcgtggactggcgggaaatctttgtcgctgcacggggtatcagatgattgtaaatacagttctggattgcgagaaaacgaagtaa

SEQ ID NO: 860 - DNA, 2803 bp, Artificial Sequence
  source: /note="Description of Artificial Sequence: Synthetic polynucleotide"
  source: /note="PfnrS-add-xapA-deoD"
ggtaccagttgttcttattggtggtgttgctttatggttgcatcgtagtaaatggttgtaacaaaagcaatttttccggctgtctgtatacaaaaacgccgtaaagtttgagcgaagtcaataaactctctacccattcagggcaatatctctcttggatccaaagtgaactctagaaataattttgtttaactttaagaaggagatatacatatgattgataccaccctgccattaactgatatccatcgccaccttgatggcaacattcgtccccagaccattcttgaacttggccgccagtataatatctcgcttcctgcacaatccctggaaacactgattccccacgttcaggtcattgccaacgaacccgatctggtgagctttctgactaaacttgactggggcgttaaagttctcgcctctcttgatgcctgccgccgcgtggcatttgaaaacattgaagatgcagcccgtaacggcctgcactatgtcgagctgcgtttttcaccaggctacatggcaatggcacatcagctgcctgtagcgggtgttgtcgaagcggtgatcgatggcgtacgtgaaggttgccgcacctttggtgtgcaggcgaagcttatcggtattatgagccggaccttcggcgaagccgcctgtcagcaagagctggaggcctttttagcccaccgtgaccagattaccgcacttgatttagccggtgatgaacttggtttcccgggaagtctgttcctttctcatttcaaccgcgcgcgtgatgcgggctggcatattaccgtccatgcaggcgaagctgccggaccggaaagcatctggcaggcgattcgtgaactgggggcggagcgtattggacatggcgtaaaagccattgaagatcgggcgctgatggattttctcgccgagcaacaaattggtattgaatcctgtctgacctccaatattcagaccagcaccgtggcggatctggctgcacatccgctgaaaacgttccttgagcatggcattcgtgccagcattaacactgacgatccaggcgtgcagggagtggatatcattcacgaatataccgttgccgcgccagctgctgggttatcccgcgagcaaatccgccaggcacagattaatggtctggaaatggctttcctcagcgcagaggaaaaacgcgcactgcgagaaaaagtcgccgcgaagtaaaagaaggagatatacatatgtatcaggctcagttttctcataacccactgtattgcgtagatattatcaagacttataaacctgatttcacgccacgagtggcctttattttaggttccgggctgggcgcgctggccgatcagattgagaacgcggtcgcaatttcctacgaaaagctgcctgggttcccggtaagtaccgtacacggtcatgcgggtgagctggtgctgggttatctccagggggtgccagtggcgtgtatgaaaggtcgcggacatttctacgaaggtcgtgggatgaccatcatgacggatgcaatccgtacctttaagttgctgggctgcgagttgctgttctgcaccaatgcggctggctcactgcgccctgaagtgggggccggcagtctggtcgcattgaaagatcacatcaacaccatgccgggaacgccgatggtgggtcttaatgatgaacgttttggtgagcgcttcttctcgctggcgaatgcctacgatgcggaataccgcgcactgttacaaaaagtggcgaaagaagaggggttccctctgacggagggcgtgttcgtctcatatccggggccgaatttcgagactgcggcggaaattcgcatgatgcaaattattggtggggatgttgttggtatgtctgtggtgcctgaggttatttcagctcgccattgcgaacttaaagtcgttgcggtctctgcgattaccaacatggcggaaggtctgagtgacgtgaagctttctcatgcccaaacgctggcagcagcggaactctcaaagcaaaactttattaatcttatttgcggctttctgcgcaaaattgcctgaaagaaggagatatacatatggctaccccacacattaatgcagaaatgggcgatttcgctgacgtagttttgatgccaggcgacccgctgcgtgcgaagtatattgctgaaactttccttgaagatgcccgtgaagtgaacaacgttcgcggtatgctgggcttcaccggtacttacaaaggccgcaaaatttccgtaatgggtcacggtatgggtatcccgtcctgctccatctacaccaaagaactgatcaccgatttcggcgtgaagaaaattatccgcgtgggttcctgtggcgcagttctgccgcacgtaaaactacgcgacgtcgttatcggtatgggtgcctgcaccgattccaaagttaaccgcatccgttttaaagaccatgactttgccgctatcgctgactttgacatggtgcgtaacgcggtagacgcggctaaagcactgggcgttgatgctcgcgtgggtaacctgttctccgctgacctgttctactctccggacggcgaaatgttcgacgtgatggaaaaatacggcatcctcggcgtggaaatggaagcggctggtatctacggcgtcgctgcagaatttggcgcgaaagccctgaccatctgcaccgtgtctgaccacatccgcactcacgagcagaccactgccgctgagcgtcagaccaccttcaacgacatgatcaaaatcgcactggaatccgttctgctgggcgataaagagtaa

SEQ ID NO: 861 - DNA, 2633 bp, Artificial Sequence
  source: /note="Description of Artificial Sequence: Synthetic polynucleotide"
  source: /note="add-xapA-deoD"
ctctagaaataattttgtttaactttaagaaggagatatacatatgattgataccaccctgccattaactgatatccatcgccaccttgatggcaacattcgtccccagaccattcttgaacttggccgccagtataatatctcgcttcctgcacaatccctggaaacactgattccccacgttcaggtcattgccaacgaacccgatctggtgagctttctgactaaacttgactggggcgttaaagttctcgcctctcttgatgcctgccgccgcgtggcatttgaaaacattgaagatgcagcccgtaacggcctgcactatgtcgagctgcgtttttcaccaggctacatggcaatggcacatcagctgcctgtagcgggtgttgtcgaagcggtgatcgatggcgtacgtgaaggttgccgcacctttggtgtgcaggcgaagcttatcggtattatgagccggaccttcggcgaagccgcctgtcagcaagagctggaggcctttttagcccaccgtgaccagattaccgcacttgatttagccggtgatgaacttggtttcccgggaagtctgttcctttctcatttcaaccgcgcgcgtgatgcgggctggcatattaccgtccatgcaggcgaagctgccggaccggaaagcatctggcaggcgattcgtgaactgggggcggagcgtattggacatggcgtaaaagccattgaagatcgggcgctgatggattttctcgccgagcaacaaattggtattgaatcctgtctgacctccaatattcagaccagcaccgtggcggatctggctgcacatccgctgaaaacgttccttgagcatggcattcgtgccagcattaacactgacgatccaggcgtgcagggagtggatatcattcacgaatataccgttgccgcgccagctgctgggttatcccgcgagcaaatccgccaggcacagattaatggtctggaaatggctttcctcagcgcagaggaaaaacgcgcactgcgagaaaaagtcgccgcgaagtaaaagaaggagatatacatatgtatcaggctcagttttctcataacccactgtattgcgtagatattatcaagacttataaacctgatttcacgccacgagtggcctttattttaggttccgggctgggcgcgctggccgatcagattgagaacgcggtcgcaatttcctacgaaaagctgcctgggttcccggtaagtaccgtacacggtcatgcgggtgagctggtgctgggttatctccagggggtgccagtggcgtgtatgaaaggtcgcggacatttctacgaaggtcgtgggatgaccatcatgacggatgcaatccgtacctttaagttgctgggctgcgagttgctgttctgcaccaatgcggctggctcactgcgccctgaagtgggggccggcagtctggtcgcattgaaagatcacatcaacaccatgccgggaacgccgatggtgggtcttaatgatgaacgttttggtgagcgcttcttctcgctggcgaatgcctacgatgcggaataccgcgcactgttacaaaaagtggcgaaagaagaggggttccctctgacggagggcgtgttcgtctcatatccggggccgaatttcgagactgcggcggaaattcgcatgatgcaaattattggtggggatgttgttggtatgtctgtggtgcctgaggttatttcagctcgccattgcgaacttaaagtcgttgcggtctctgcgattaccaacatggcggaaggtctgagtgacgtgaagctttctcatgcccaaacgctggcagcagcggaactctcaaagcaaaactttattaatcttatttgcggctttctgcgcaaaattgcctgaaagaaggagatatacatatggctaccccacacattaatgcagaaatgggcgatttcgctgacgtagttttgatgccaggcgacccgctgcgtgcgaagtatattgctgaaactttccttgaagatgcccgtgaagtgaacaacgttcgcggtatgctgggcttcaccggtacttacaaaggccgcaaaatttccgtaatgggtcacggtatgggtatcccgtcctgctccatctacaccaaagaactgatcaccgatttcggcgtgaagaaaattatccgcgtgggttcctgtggcgcagttctgccgcacgtaaaactacgcgacgtcgttatcggtatgggtgcctgcaccgattccaaagttaaccgcatccgttttaaagaccatgactttgccgctatcgctgactttgacatggtgcgtaacgcggtagacgcggctaaagcactgggcgttgatgctcgcgtgggtaacctgttctccgctgacctgttctactctccggacggcgaaatgttcgacgtgatggaaaaatacggcatcctcggcgtggaaatggaagcggctggtatctacggcgtcgctgcagaatttggcgcgaaagccctgaccatctgcaccgtgtctgaccacatccgcactcacgagcagaccactgccgctgagcgtcagaccaccttcaacgacatgatcaaaatcgcactggaatccgttctgctgggcgataaagagtaa

SEQ ID NO: 862 - DNA, 1053 bp, Artificial Sequence
  source: /note="Description of Artificial Sequence: Synthetic polynucleotide"
  source: /note="fbrAroG"
atgaattatcagaacgacgatttacgcatcaaagaaatcaaagagttacttcctcctgtcgcattgctggaaaaattccccgctactgaaaatgccgcgaatacggtcgcccatgcccgaaaagcgatccataagatcctgaaaggtaatgatgatcgcctgttggtggtgattggcccatgctcaattcatgatcctgtcgcggctaaagagtatgccactcgcttgctgacgctgcgtgaagagctgcaagatgagctggaaatcgtgatgcgcgtctattttgaaaagccgcgtactacggtgggctggaaagggctgattaacgatccgcatatggataacagcttccagatcaacgacggtctgcgtattgcccgcaaattgctgctcgatattaacgacagcggtctgccagcggcgggtgaattcctggatatgatcaccctacaatatctcgctgacctgatgagctggggcgcaattggcgcacgtaccaccgaatcgcaggtgcaccgcgaactggcgtctggtctttcttgtccggtaggtttcaaaaatggcactgatggtacgattaaagtggctatcgatgccattaatgccgccggtgcgccgcactgcttcctgtccgtaacgaaatgggggcattcggcgattgtgaataccagcggtaacggcgattgccatatcattctgcgcggcggtaaagagcctaactacagcgcgaagcacgttgctgaagtgaaagaagggctgaacaaagcaggcctgccagcgcaggtgatgatcgatttcagccatgctaactcgtcaaaacaattcaaaaagcagatggatgtttgtactgacgtttgccagcagattgccggtggcgaaaaggccattattggcgtgatggtggaaagccatctggtggaaggcaatcagagcctcgagagcggggaaccgctggcctacggtaagagcatcaccgatgcctgcattggctgggatgataccgatgctctgttacgtcaactggcgagtgcagtaaaagcgcgtcgcgggtaa

SEQ ID NO: 863 - DNA, 2351 bp, Artificial Sequence
  source: /note="Description of Artificial Sequence: Synthetic polynucleotide"
  source: /note="fbrAroG-serA"
ctctagaaataattttgtttaactttaagaaggagatatacatatgaattatcagaacgacgatttacgcatcaaagaaatcaaagagttacttcctcctgtcgcattgctggaaaaattccccgctactgaaaatgccgcgaatacggtcgcccatgcccgaaaagcgatccataagatcctgaaaggtaatgatgatcgcctgttggtggtgattggcccatgctcaattcatgatcctgtcgcggctaaagagtatgccactcgcttgctgacgctgcgtgaagagctgcaagatgagctggaaatcgtgatgcgcgtctattttgaaaagccgcgtactacggtgggctggaaagggctgattaacgatccgcatatggataacagcttccagatcaacgacggtctgcgtattgcccgcaaattgctgctcgatattaacgacagcggtctgccagcggcgggtgaattcctggatatgatcaccctacaatatctcgctgacctgatgagctggggcgcaattggcgcacgtaccaccgaatcgcaggtgcaccgcgaactggcgtctggtctttcttgtccggtaggtttcaaaaatggcactgatggtacgattaaagtggctatcgatgccattaatgccgccggtgcgccgcactgcttcctgtccgtaacgaaatgggggcattcggcgattgtgaataccagcggtaacggcgattgccatatcattctgcgcggcggtaaagagcctaactacagcgcgaagcacgttgctgaagtgaaagaagggctgaacaaagcaggcctgccagcgcaggtgatgatcgatttcagccatgctaactcgtcaaaacaattcaaaaagcagatggatgtttgtactgacgtttgccagcagattgccggtggcgaaaaggccattattggcgtgatggtggaaagccatctggtggaaggcaatcagagcctcgagagcggggaaccgctggcctacggtaagagcatcaccgatgcctgcattggctgggatgataccgatgctctgttacgtcaactggcgagtgcagtaaaagcgcgtcgcgggtaatacttaagaaggagatatacatatggcaaaggtatcgctggagaaagacaagattaagtttctgctggtagaaggcgtgcaccaaaaggcgctggaaagccttcgtgcagctggttacaccaacatcgaatttcacaaaggcgcgctggatgatgaacaattaaaagaatccatccgcgatgcccacttcatcggcctgcgatcccgtacccatctgactgaagacgtgatcaacgccgcagaaaaactggtcgctattggctgtttctgtatcggaacaaatcaggttgatctggatgcggcggcaaagcgcgggatcccggtatttaacgcaccgttctcaaatacgcgctctgttgcggagctggtgattggcgaactgctgctgctattgcgcggcgtgccagaagccaatgctaaagcgcatcgtggcgtgtggaacaaactggcggcgggttcttttgaagcgcgcggcaaaaagctgggtatcatcggctacggtcatattggtacgcaattgggcattctggctgaatcgctgggaatgtatgtttacttttatgatattgaaaacaaactgccgctgggcaacgccactcaggtacagcatctttctgacctgctgaatatgagcgatgtggtgagtctgcatgtaccagagaatccgtccaccaaaaatatgatgggcgcgaaagagatttcgctaatgaagcccggctcgctgctgattaatgcttcgcgcggtactgtggtggatattccagcgctgtgtgacgcgctggcgagcaaacatctggcgggggcggcaatcgacgtattcccgacggaaccggcgaccaatagcgatccatttacctctccgctgtgtgaattcgacaatgtccttctgacgccacacattggcggttcgactcaggaagcgcaggagaatatcggcttggaagttgcgggtaaattgatcaagtattctgacaatggctcaacgctctctgcggtgaacttcccggaagtctcgctgccactgcacggtgggcgtcgtctgatgcacatccacgaaaaccgtccgggcgtgctaactgcgctcaacaaaatttttgccgagcagggcgtcaacatcgccgcgcaatatctacaaacttccgcccagatgggttatgtagttattgatattgaagccgacgaagacgttgccgaaaaagcgctgcaggcaatgaaagctattccgggtaccattcgcgcccgtctgctgtactaa

SEQ ID NO: 864 - DNA, 1233 bp, Artificial Sequence
  source: /note="Description of Artificial Sequence: Synthetic polynucleotide"
  source: /note="SerA"
atggcaaaggtatcgctggagaaagacaagattaagtttctgctggtagaaggcgtgcaccaaaaggcgctggaaagccttcgtgcagctggttacaccaacatcgaatttcacaaaggcgcgctggatgatgaacaattaaaagaatccatccgcgatgcccacttcatcggcctgcgatcccgtacccatctgactgaagacgtgatcaacgccgcagaaaaactggtcgctattggctgtttctgtatcggaacaaatcaggttgatctggatgcggcggcaaagcgcgggatcccggtatttaacgcaccgttctcaaatacgcgctctgttgcggagctggtgattggcgaactgctgctgctattgcgcggcgtgccagaagccaatgctaaagcgcatcgtggcgtgtggaacaaactggcggcgggttcttttgaagcgcgcggcaaaaagctgggtatcatcggctacggtcatattggtacgcaattgggcattctggctgaatcgctgggaatgtatgtttacttttatgatattgaaaacaaactgccgctgggcaacgccactcaggtacagcatctttctgacctgctgaatatgagcgatgtggtgagtctgcatgtaccagagaatccgtccaccaaaaatatgatgggcgcgaaagagatttcgctaatgaagcccggctcgctgctgattaatgcttcgcgcggtactgtggtggatattccagcgctgtgtgacgcgctggcgagcaaacatctggcgggggcggcaatcgacgtattcccgacggaaccggcgaccaatagcgatccatttacctctccgctgtgtgaattcgacaatgtccttctgacgccacacattggcggttcgactcaggaagcgcaggagaatatcggcttggaagttgcgggtaaattgatcaagtattctgacaatggctcaacgctctctgcggtgaacttcccggaagtctcgctgccactgcacggtgggcgtcgtctgatgcacatccacgaaaaccgtccgggcgtgctaactgcgctcaacaaaatttttgccgagcagggcgtcaacatcgccgcgcaatatctacaaacttccgcccagatgggttatgtagttattgatattgaagccgacgaagacgttgccgaaaaagcgctgcaggcaatgaaagctattccgggtaccattcgcgcccgtctgctgtactaa

SEQ ID NO: 865 - DNA, 1424 bp, Artificial Sequence
  source: /note="Description of Artificial Sequence: Synthetic polynucleotide"
  source: /note="Ptet-kynU(Pseudomonas)"
atctaatctagacatcattaattcctaatttttgttgacactctatcattgatagagttattttaccactccctatcagtgatagagaaaagtgaattatataaaagtgggaggtgcccgaatgacgacccgaaatgattgcctagcgttggatgcacaggacagtctggctccgctgcgccaacaatttgcgctgccggagggtgtgatatacctggatggcaattcgctgggcgcacgtccggtagctgcgctggctcgcgcgcaggctgtgatcgcagaagaatggggcaacgggttgatccgttcatggaactctgcgggctggcgtgatctgtctgaacgcctgggtaatcgcctggctaccctgattggtgcgcgcgatggggaagtagttgttactgataccacctcgattaatctgtttaaagtgctgtcagcggcgctgcgcgtgcaagctacccgtagcccggagcgccgtgttatcgtgactgagacctcgaatttcccgaccgacctgtatattgcggaagggttggcggatatgctgcaacaaggttacactctgcgtttggtggattcaccggaagagctgccacaggctatagatcaggacaccgcggtggtgatgctgacgcacgtaaattataaaaccggttatatgcacgacatgcaggctctgaccgcgttgagccacgagtgtggggctctggcgatttgggatctggcgcactctgctggcgctgtgccggtggacctgcaccaagcgggcgcggactatgcgattggctgcacgtacaaatacctgaatggcggcccgggttcgcaagcgtttgtttgggtttcgccgcaactgtgcgacctggtaccgcagccgctgtctggttggttcggccatagtcgccaattcgcgatggagccgcgctacgaaccttctaacggcattgctcgctatctgtgcggcactcagcctattactagcttggctatggtggagtgcggcctggatgtgtttgcgcagacggatatggcttcgctgcgccgtaaaagtctggcgctgactgatctgttcatcgagctggttgaacaacgctgcgctgcacacgaactgaccctggttactccacgtgaacacgcgaaacgcggctctcacgtgtcttttgaacaccccgagggttacgctgttattcaagctctgattgatcgtggcgtgatcggcgattaccgtgagccacgtattatgcgtttcggtttcactcctctgtatactacttttacggaagtttgggatgcagtacaaatcctgggcgaaatcctggatcgtaagacttgggcgcaggctcagtttcaggtgcgccactctgttacttaaaaataaaacgaaaggctcagtcgaaagactgggcctttcgttttatctgttg

SEQ ID NO: 866 - DNA, 1571 bp, Artificial Sequence
  source: /note="Description of Artificial Sequence: Synthetic polynucleotide"
  source: /note="Ptet-kynU(Human)"
atctaatctagacatcattaattcctaatttttgttgacactctatcattgatagagttattttaccactccctatcagtgatagagaaaagtgaatatcaagacacgaggaggtaagattatggagccttcatctttagaactgccagcggacacggtgcagcgcatcgcggcggaactgaagtgccatccgactgatgagcgtgtggcgctgcatctggacgaagaagataaactgcgccactttcgtgaatgtttttatattcctaaaattcaagacttgccgccggtagatttgagtctcgttaacaaagatgaaaacgcgatctactttctgggcaactctctgggtctgcaaccaaaaatggttaaaacgtacctggaggaagaactggataaatgggcaaaaatcgcggcttatggtcacgaagtgggcaagcgtccttggattactggcgacgagtctattgtgggtttgatgaaagatattgtgggcgcgaatgaaaaggaaattgcactgatgaatgctctgaccgttaatctgcacctgctgatgctgtctttttttaaaccgaccccgaaacgctacaaaatactgctggaagcgaaagcgtttccgtcggatcactatgctatagaaagtcaactgcagttgcatggtctgaatatcgaggaatctatgcgcatgattaaaccgcgtgagggtgaagaaacgctgcgtattgaagacattctggaagttattgaaaaagaaggtgattctatcgcagttatactgttttctggcgtgcacttttatacaggtcagcacttcaatatcccggcaatcactaaagcggggcaggcaaaaggctgctatgttggttttgacctggcgcatgcagtggggaatgttgaactgtatctgcacgattggggcgttgatttcgcgtgttggtgtagctacaaatatctgaacgctggcgcgggtggcattgctggcgcttttattcacgaaaaacacgcgcacaccattaaaccggctctggttggctggttcggtcatgagctgagtactcgctttaaaatggataacaaactgcaattgattccgggtgtttgcggcttccgtatcagcaatccgccgattctgctggtttgcagcctgcacgctagtctggaaatctttaagcaggcgactatgaaagcgctgcgcaaaaaatctgtgctgctgaccggctatctggagtatctgatcaaacacaattatggcaaagataaagctgcaactaaaaaaccggtagtgaacattatcaccccctcacacgtggaggagcgcggttgtcagctgactattactttcagtgtacctaataaagatgtgttccaggaactggaaaaacgcggcgttgtttgtgataaacgtaacccgaatggtattcgcgtggctcctgtgccgctgtacaattcattccacgatgtttataaattcaccaacctgctgacttctattctcgacagtgctgagactaaaaattaaaaataaaacgaaaggctcagtcgaaagactgggcctttcgttttatctgttg

SEQ ID NO: 867 - DNA, 1310 bp, Artificial Sequence
  source: /note="Description of Artificial Sequence: Synthetic polynucleotide"
  source: /note="ptet-kynU(Shewanella)"
atctaatctagacatcattaattcctaatttttgttgacactctatcattgatagagttattttaccactccctatcagtgatagagaaaagtgaatggttcaccaccacaaggagggattatgctgctgaatgtaaaacaggacttttgcctggcaggcccgggctacctgctgaatcactcggttggccgtccgctgaaatcaactgagcaagcgctgaaacaagcattttttgctccgtggcaagagagcggtcgtgaaccgtggggccagtggctgggtgttattgataatttcactgctgcgctggcatctctgtttaatggtcaaccgcaggatttttgtccgcaggttaacctgagcagcgcgctgactaaaattgtgatgtcactggatcgtctgactcgcgatctgacccgcaatggcggtgctgttgtgctgatgtctgaaatcgatttcccatctatgggcttcgcgttgaaaaaagcgctgccagcgagctgcgaactgcgttttatcccgaaaagtctggacgtgactgatccgaacgtatgggatgcacacatctgtgatgatgtagacctggtttttgtgtctcacgcctatagtaatacgggccaacaggctccgctggcgcaaatcatctctctggcgcgtgaacgtggctgcctgtcactggtggatgtagcgcaatcagcggggattttgccgctggatctggcgaaactgcaaccggacttcatgatcggcagttcggttaaatggctgtgctcgggccctggtgcggcatatctgtgggttaatccggcgattctgccggaatgtcagccgcaggatgtgggctggttttcacatgagaatccctttgaattcgacatccacgatttccgctaccacccgactgcactgcgcttttggggtggtacgccgtcgatcgcgccttatgcgatcgcggcgcactcgatcgaatattttgccaatatcggctcgcaagtgatgcgtgaacacaacctgcaactgatggaaccggtggttcaggcgctggacaatgaactggtgagcccgcaggaagtggataaacgctcaggcactattattctgcaattcggtgaacgtcaaccgcaaattctggcggctctggctgcggcgaacatttcggtggacactcgttctttggggattcgtgttagtccgcacatttataatgatgaggcggacattgcgcgcctgctgggtgtgatcaaagcaaatcgctaaaaataaaacgaaaggctcagtcgaaagactgggcctttcgttttatctgttg

SEQ ID NO: 868 - DNA, 1096 bp, Artificial Sequence
  source: /note="Description of Artificial Sequence: Synthetic polynucleotide"
  source: /note="fbrAroG"
ctctagaaataattttgtttaactttaagaaggagatatacatatgaattatcagaacgacgatttacgcatcaaagaaatcaaagagttacttcctcctgtcgcattgctggaaaaattccccgctactgaaaatgccgcgaatacggtcgcccatgcccgaaaagcgatccataagatcctgaaaggtaatgatgatcgcctgttggtggtgattggcccatgctcaattcatgatcctgtcgcggctaaagagtatgccactcgcttgctgacgctgcgtgaagagctgcaagatgagctggaaatcgtgatgcgcgtctattttgaaaagccgcgtactacggtgggctggaaagggctgattaacgatccgcatatggataacagcttccagatcaacgacggtctgcgtattgcccgcaaattgctgctcgatattaacgacagcggtctgccagcggcgggtgaattcctggatatgatcaccctacaatatctcgctgacctgatgagctggggcgcaattggcgcacgtaccaccgaatcgcaggtgcaccgcgaactggcgtctggtctttcttgtccggtaggtttcaaaaatggcactgatggtacgattaaagtggctatcgatgccattaatgccgccggtgcgccgcactgcttcctgtccgtaacgaaatgggggcattcggcgattgtgaataccagcggtaacggcgattgccatatcattctgcgcggcggtaaagagcctaactacagcgcgaagcacgttgctgaagtgaaagaagggctgaacaaagcaggcctgccagcgcaggtgatgatcgatttcagccatgctaactcgtcaaaacaattcaaaaagcagatggatgtttgtactgacgtttgccagcagattgccggtggcgaaaaggccattattggcgtgatggtggaaagccatctggtggaaggcaatcagagcctcgagagcggggaaccgctggcctacggtaagagcatcaccgatgcctgcattggctgggatgataccgatgctctgttacgtcaactggcgagtgcagtaaaagcgcgtcgcgggtaa

SEQ ID NO: 869 - DNA, 28 bp, Artificial Sequence
  source: /note="Description of Artificial Sequence: Synthetic oligonucleotide"
  source: /note="BBa_J61133"
tctagagaaagacccgagacactagatg

SEQ ID NO: 870 - DNA, 28 bp, Artificial Sequence
  source: /note="Description of Artificial Sequence: Synthetic oligonucleotide"
  source: /note="BBa_J61134"
tctagagaaagaccggaaatactagatg

SEQ ID NO: 871 - DNA, 28 bp, Artificial Sequence
  source: /note="Description of Artificial Sequence: Synthetic oligonucleotide"
  source: /note="BBa_J61135"
tctagagaaagaccggagacactagatg

SEQ ID NO: 872 - DNA, 6573 bp, Artificial Sequence
  source: /note="Description of Artificial Sequence: Synthetic polynucleotide"
  source: /note="TrpEDCBA"
ctctagaaataattttgtttaactttaagaaggagatatacatatgcaaacacaaaaaccgactctcgaactgctaacctgcgaaggcgcttatcgcgacaacccgactgcgctttttcaccagttgtgtggggatcgtccggcaacgctgctgctggaatccgcagatatcgacagcaaagatgatttaaaaagcctgctgctggtagacagtgcgctgcgcattacagcattaagtgacactgtcacaatccaggcgctttccggcaatggagaagccctgttgacactactggataacgccttgcctgcgggtgtggaaaatgaacaatcaccaaactgccgcgtactgcgcttcccgcctgtcagtccactgctggatgaagacgcccgcttatgctccctttcggtttttgacgctttccgcttattacagaatctgttgaatgtaccgaaggaagaacgagaagcaatgttcttcggcggcctgttctcttatgaccttgtggcgggatttgaaaatttaccgcaactgtcagcggaaaatagctgccctgatttctgtttttatctcgctgaaacgctgatggtgattgaccatcagaaaaaaagcactcgtattcaggccagcctgtttgctccgaatgaagaagaaaaacaacgtctcactgctcgcctgaacgaactacgtcagcaactgaccgaagccgcgccgccgctgccggtggtttccgtgccgcatatgcgttgtgaatgtaaccagagcgatgaagagttcggtggtgtagtgcgtttgttgcaaaaagcgattcgcgccggagaaattttccaggtggtgccatctcgccgtttctctctgccctgcccgtcaccgctggcagcctattacgtgctgaaaaagagtaatcccagcccgtacatgttttttatgcaggataatgatttcaccctgtttggcgcgtcgccggaaagttcgctcaagtatgacgccaccagccgccagattgagatttacccgattgccggaacacgtccacgcggtcgtcgtgccgatggttcgctggacagagacctcgacagccgcatcgaactggagatgcgtaccgatcataaagagctttctgaacatctgatgctggtggatctcgcccgtaatgacctggcacgcatttgcacacccggcagccgctacgtcgccgatctcaccaaagttgaccgttactcttacgtgatgcacctagtctcccgcgttgttggtgagctgcgccacgatctcgacgccctgcacgcttaccgcgcctgtatgaatatggggacgttaagcggtgcaccgaaagtacgcgctatgcagttaattgccgaagcagaaggtcgtcgacgcggcagctacggcggcgcggtaggttattttaccgcgcatggcgatctcgacacctgcattgtgatccgctcggcgctggtggaaaacggtatcgccaccgtgcaagccggtgctggcgtagtccttgattctgttccgcagtcggaagccgacgaaactcgtaataaagcccgcgctgtactgcgcgctattgccaccgcgcatcatgcacaggagacgttctaatggctgacattctgctgctcgataatatcgactcttttacgtacaacctggcagatcagttgcgcagcaatggtcataacgtggtgatttaccgcaaccatattccggcgcagaccttaattgaacgcctggcgacgatgagcaatccggtgctgatgctttctcctggccccggtgtgccgagcgaagccggttgtatgccggaactcctcacccgcttgcgtggcaagctgccaattattggcatttgcctcggacatcaggcgattgtcgaagcttacgggggctatgtcggtcaggcgggcgaaattcttcacggtaaagcgtcgagcattgaacatgacggtcaggcgatgtttgccggattaacaaacccgctgccagtggcgcgttatcactcgctggttggcagtaacattccggccggtttaaccatcaacgcccattttaatggcatggtgatggcggtgcgtcacgatgcagatcgcgtttgtggattccagttccatccggaatccattcttactacccagggcgctcgcctgctggaacaaacgctggcctgggcgcagcagaaactagagccaaccaacacgctgcaaccgattctggaaaaactgtatcaggcacagacgcttagccaacaagaaagccaccagctgttttcagcggtggtacgtggcgagctgaagccggaacaactggcggcggcgctggtgagcatgaaaattcgcggtgaacacccgaacgagatcgccggggcagcaaccgcgctactggaaaacgccgcgccattcccgcgcccggattatctgtttgccgatatcgtcggtactggcggtgacggcagcaacagcatcaatatttctaccgccagtgcgtttgtcgccgcggcctgcgggctgaaagtggcgaaacacggcaaccgtagcgtctccagtaaatccggctcgtcggatctgctggcggcgttcggtattaatcttgatatgaacgccgataaatcgcgccaggcgctggatgagttaggcgtctgtttcctctttgcgccgaagtatcacaccggattccgccatgcgatgccggttcgccagcaactgaaaacccgcactctgttcaacgtgctgggaccattgattaacccggcgcatccgccgctggcgctaattggtgtttatagtccggaactggtgctgccgattgccgaaaccttgcgcgtgctggggtatcaacgcgcggcagtggtgcacagcggcgggatggatgaagtttcattacacgcgccgacaatcgttgccgaactacatgacggcgaaattaagagctatcaattgaccgctgaagattttggcctgacaccctaccaccaggagcaattggcaggcggaacaccggaagaaaaccgtgacattttaacacgcttgttacaaggtaaaggcgacgccgcccatgaagcagccgtcgcggcgaatgtcgccatgttaatgcgcctgcatggccatgaagatctgcaagccaatgcgcaaaccgttcttgaggtactgcgcagtggttccgcttacgacagagtcaccgcactggcggcacgagggtaaatgatgcaaaccgttttagcgaaaatcgtcgcagacaaggcgatttgggtagaaacccgcaaagagcagcaaccgctggccagttttcagaatgaggttcagccgagcacgcgacatttttatgatgcacttcagggcgcacgcacggcgtttattctggagtgtaaaaaagcgtcgccgtcaaaaggcgtgatccgtgatgatttcgatccggcacgcattgccgccatttataaacattacgcttcggcaatttcagtgctgactgatgagaaatattttcaggggagctttgatttcctccccatcgtcagccaaatcgccccgcagccgattttatgtaaagacttcattatcgatccttaccagatctatctggcgcgctattaccaggccgatgcctgcttattaatgctttcagtactggatgacgaacaatatcgccagcttgcagccgtcgcccacagtctggagatgggtgtgctgaccgaagtcagtaatgaagaggaactggagcgcgccattgcattgggggcaaaggtcgttggcatcaacaaccgcgatctgcgcgatttgtcgattgatctcaaccgtacccgcgagcttgcgccgaaactggggcacaacgtgacggtaatcagcgaatccggcatcaatacttacgctcaggtgcgcgagttaagccacttcgctaacggctttctgattggttcggcgttgatggcccatgacgatttgaacgccgccgtgcgtcgggtgttgctgggtgagaataaagtatgtggcctgacacgtgggcaagatgctaaagcagcttatgacgcgggcgcgatttacggtgggttgatttttgttgcgacatcaccgcgttgcgtcaacgttgaacaggcgcaggaagtgatggctgcagcaccgttgcagtatgttggcgtgttccgcaatcacgatattgccgatgtggcggacaaagctaaggtgttatcgctggcggcagtgcaactgcatggtaatgaagatcagctgtatatcgacaatctgcgtgaggctctgccagcacacgtcgccatctggaaggctttaagtgtcggtgaaactcttcccgcgcgcgattttcagcacatcgataaatatgtattcgacaacggtcagggcgggagcggacaacgtttcgactggtcactattaaatggtcaatcgcttggcaacgttctgctggcggggggcttaggcgcagataactgcgtggaagcggcacaaaccggctgcgccgggcttgattttaattctgctgtagagtcgcaaccgggtatcaaagacgcacgtcttttggcctcggttttccagacgctgcgcgcatattaaggaaaggaacaatgacaacattacttaacccctattttggtgagtttggcggcatgtacgtgccacaaatcctgatgcctgctctgcgccagctggaagaagcttttgtcagcgcgcaaaaagatcctgaatttcaggctcagttcaacgacctgctgaaaaactatgccgggcgtccaaccgcgctgaccaaatgccagaacattacagccgggacgaacaccacgctgtatctgaagcgcgaagatttgctgcacggcggcgcgcataaaactaaccaggtgctcggtcaggctttactggcgaagcggatgggtaaaactgaaattattgccgaaaccggtgccggtcagcatggcgtggcgtcggcccttgccagcgccctgctcggcctgaaatgccgaatttatatgggtgccaaagacgttgaacgccagtcgcccaacgttttccggatgcgcttaatgggtgcggaagtgatcccggtacatagcggttccgcgaccctgaaagatgcctgtaatgaggcgctacgcgactggtccggcagttatgaaaccgcgcactatatgctgggtaccgcagctggcccgcatccttacccgaccattgtgcgtgagtttcagcggatgattggcgaagaaacgaaagcgcagattctggaaagagaaggtcgcctgccggatgccgttatcgcctgtgttggcggtggttcgaatgccatcggtatgtttgcagatttcatcaacgaaaccgacgtcggcctgattggtgtggagcctggcggccacggtatcgaaactggcgagcacggcgcaccgttaaaacatggtcgcgtgggcatctatttcggtatgaaagcgccgatgatgcaaaccgaagacgggcaaattgaagagtcttactccatttctgccgggctggatttcccgtccgtcggcccgcaacatgcgtatctcaacagcactggacgcgctgattacgtgtctattaccgacgatgaagccctggaagcctttaaaacgctttgcctgcatgaagggatcatcccggcgctggaatcctcccacgccctggcccatgcgctgaaaatgatgcgcgaaaatccggaaaaagagcagctactggtggttaacctttccggtcgcggcgataaagacatcttcaccgttcacgatattttgaaagcacgaggggaaatctgatggaacgctacgaatctctgtttgcccagttgaaggagcgcaaagaaggcgcattcgttcctttcgtcaccctcggtgatccgggcattgagcagtcgttgaaaattatcgatacgctaattgaagccggtgctgacgcgctggagttaggcatccccttctccgacccactggcggatggcccgacgattcaaaacgccacactgcgtgcttttgcggcgggagtaaccccggcgcagtgctttgagatgctggcactcattcgccagaagcacccgaccattcccatcggccttttgatgtatgccaacctggtgtttaacaaaggcattgatgagttttatgccgagtgcgagaaagtcggcgtcgattcggtgctggttgccgatgtgcccgtggaagagtccgcgcccttccgccaggccgcgttgcgtcataatgtcgcacctatctttatttgcccgccgaatgccgacgatgatttgctgcgccagatagcctcttacggtcgtggttacacctatttgctgtcgcgagcgggcgtgaccggcgcagaaaaccgcgccgcgttacccctcaatcatctggttgcgaagctgaaagagtacaacgctgcgcctccattgcagggatttggtatttccgccccggatcaggtaaaagccgcgattgatgcaggagctgcgggcgcgatttctggttcggccatcgttaaaatcatcgagcaacatattaatgagccagagaaaatgctggcggcactgaaagcttttgtacaaccgatgaaagcggcgacgcgcagtta

SEQ ID NO: 873 - DNA, 28 bp, Artificial Sequence
  source: /note="Description of Artificial Sequence: Synthetic oligonucleotide"
  source: /note="BBa_J61132"
tctagagaaagacaggattaactagatg

SEQ ID NO: 874 - DNA, 28 bp, Artificial Sequence
  source: /note="Description of Artificial Sequence: Synthetic oligonucleotide"
  source: /note="BBa_J61136"
tctagagaaagagctgagcaactagatg

SEQ ID NO: 875 - DNA, 28 bp, Artificial Sequence
  source: /note="Description of Artificial Sequence: Synthetic oligonucleotide"
  source: /note="BBa_J61137"
tctagagaaagagtagatcaactagatg

SEQ ID NO: 876 - DNA, 28 bp, Artificial Sequence
  source: /note="Description of Artificial Sequence: Synthetic oligonucleotide"
  source: /note="BBa_J61138"
tctagagaaagatatgaataactagatg

SEQ ID NO: 877 - DNA, 28 bp, Artificial Sequence
  source: /note="Description of Artificial Sequence: Synthetic oligonucleotide"
  source: /note="BBa_J61139"
tctagagaaagattagagtcactagatg

SEQ ID NO: 878 - DNA, 6574 bp, Artificial Sequence
  source: /note="Description of Artificial Sequence: Synthetic polynucleotide"
  source: /note="fbrS40FTrpE-DCBA"
ctctagaaataattttgtttaactttaagaaggagatatacatatgcaaacacaaaaaccgactctcgaactgctaacctgcgaaggcgcttatcgcgacaacccgactgcgctttttcaccagttgtgtggggatcgtccggcaacgctgctgctggaattcgcagatatcgacagcaaagatgatttaaaaagcctgctgctggtagacagtgcgctgcgcattacagcattaagtgacactgtcacaatccaggcgctttccggcaatggagaagccctgttgacactactggataacgccttgcctgcgggtgtggaaaatgaacaatcaccaaactgccgcgtactgcgcttcccgcctgtcagtccactgctggatgaagacgcccgcttatgctccctttcggtttttgacgctttccgcttattacagaatctgttgaatgtaccgaaggaagaacgagaagcaatgttcttcggcggcctgttctcttatgaccttgtggcgggatttgaaaatttaccgcaactgtcagcggaaaatagctgccctgatttctgtttttatctcgctgaaacgctgatggtgattgaccatcagaaaaaaagcactcgtattcaggccagcctgtttgctccgaatgaagaagaaaaacaacgtctcactgctcgcctgaacgaactacgtcagcaactgaccgaagccgcgccgccgctgccggtggtttccgtgccgcatatgcgttgtgaatgtaaccagagcgatgaagagttcggtggtgtagtgcgtttgttgcaaaaagcgattcgcgccggagaaattttccaggtggtgccatctcgccgtttctctctgccctgcccgtcaccgctggcagcctattacgtgctgaaaaagagtaatcccagcccgtacatgttttttatgcaggataatgatttcaccctgtttggcgcgtcgccggaaagttcgctcaagtatgacgccaccagccgccagattgagatttacccgattgccggaacacgtccacgcggtcgtcgtgccgatggttcgctggacagagacctcgacagccgcatcgaactggagatgcgtaccgatcataaagagctttctgaacatctgatgctggtggatctcgcccgtaatgacctggcacgcatttgcacacccggcagccgctacgtcgccgatctcaccaaagttgaccgttactcttacgtgatgcacctagtctcccgcgttgttggtgagctgcgccacgatctcgacgccctgcacgcttaccgcgcctgtatgaatatggggacgttaagcggtgcaccgaaagtacgcgctatgcagttaattgccgaagcagaaggtcgtcgacgcggcagctacggcggcgcggtaggttattttaccgcgcatggcgatctcgacacctgcattgtgatccgctcggcgctggtggaaaacggtatcgccaccgtgcaagccggtgctggcgtagtccttgattctgttccgcagtcggaagccgacgaaactcgtaataaagcccgcgctgtactgcgcgctattgccaccgcgcatcatgcacaggagacgttctaatggctgacattctgctgctcgataatatcgactcttttacgtacaacctggcagatcagttgcgcagcaatggtcataacgtggtgatttaccgcaaccatattccggcgcagaccttaattgaacgcctggcgacgatgagcaatccggtgctgatgctttctcctggccccggtgtgccgagcgaagccggttgtatgccggaactcctcacccgcttgcgtggcaagctgccaattattggcatttgcctcggacatcaggcgattgtcgaagcttacgggggctatgtcggtcaggcgggcgaaattcttcacggtaaagcgtcgagcattgaacatgacggtcaggcgatgtttgccggattaacaaacccgctgccagtggcgcgttatcactcgctggttggcagtaacattccggccggtttaaccatcaacgcccattttaatggcatggtgatggcggtgcgtcacgatgcagatcgcgtttgtggattccagttccatccggaatccattcttactacccagggcgctcgcctgctggaacaaacgctggcctgggcgcagcagaaactagagccaaccaacacgctgcaaccgattctggaaaaactgtatcaggcacagacgcttagccaacaagaaagccaccagctgttttcagcggtggtacgtggcgagctgaagccggaacaactggcggcggcgctggtgagcatgaaaattcgcggtgaacacccgaacgagatcgccggggcagcaaccgcgctactggaaaacgccgcgccattcccgcgcccggattatctgtttgccgatatcgtcggtactggcggtgacggcagcaacagcatcaatatttctaccgccagtgcgtttgtcgccgcggcctgcgggctgaaagtggcgaaacacggcaaccgtagcgtctccagtaaatccggctcgtcggatctgctggcggcgttcggtattaatcttgatatgaacgccgataaatcgcgccaggcgctggatgagttaggcgtctgtttcctctttgcgccgaagtatcacaccggattccgccatgcgatgccggttcgccagcaactgaaaacccgcactctgttcaacgtgctgggaccattgattaacccggcgcatccgccgctggcgctaattggtgtttatagtccggaactggtgctgccgattgccgaaaccttgcgcgtgctggggtatcaacgcgcggcagtggtgcacagcggcgggatggatgaagtttcattacacgcgccgacaatcgttgccgaactacatgacggcgaaattaagagctatcaattgaccgctgaagattttggcctgacaccctaccaccaggagcaattggcaggcggaacaccggaagaaaaccgtgacattttaacacgcttgttacaaggtaaaggcgacgccgcccatgaagcagccgtcgcggcgaatgtcgccatgttaatgcgcctgcatggccatgaagatctgcaagccaatgcgcaaaccgttcttgaggtactgcgcagtggttccgcttacgacagagtcaccgcactggcggcacgagggtaaatgatgcaaaccgttttagcgaaaatcgtcgcagacaaggcgatttgggtagaaacccgcaaagagcagcaaccgctggccagttttcagaatgaggttcagccgagcacgcgacatttttatgatgcacttcagggcgcacgcacggcgtttattctggagtgtaaaaaagcgtcgccgtcaaaaggcgtgatccgtgatgatttcgatccggcacgcattgccgccatttataaacattacgcttcggcaatttcagtgctgactgatgagaaatattttcaggggagctttgatttcctccccatcgtcagccaaatcgccccgcagccgattttatgtaaagacttcattatcgatccttaccagatctatctggcgcgctattaccaggccgatgcctgcttattaatgctttcagtactggatgacgaacaatatcgccagcttgcagccgtcgcccacagtctggagatgggtgtgctgaccgaagtcagtaatgaagaggaactggagcgcgccattgcattgggggcaaaggtcgttggcatcaacaaccgcgatctgcgcgatttgtcgattgatctcaaccgtacccgcgagcttgcgccgaaactggggcacaacgtgacggtaatcagcgaatccggcatcaatacttacgctcaggtgcgcgagttaagccacttcgctaacggctttctgattggttcggcgttgatggcccatgacgatttgaacgccgccgtgcgtcgggtgttgctgggtgagaataaagtatgtggcctgacacgtgggcaagatgctaaagcagcttatgacgcgggcgcgatttacggtgggttgatttttgttgcgacatcaccgcgttgcgtcaacgttgaacaggcgcaggaagtgatggctgcagcaccgttgcagtatgttggcgtgttccgcaatcacgatattgccgatgtggcggacaaagctaaggtgttatcgctggcggcagtgcaactgcatggtaatgaagatcagctgtatatcgacaatctgcgtgaggctctgccagcacacgtcgccatctggaaggctttaagtgtcggtgaaactcttcccgcgcgcgattttcagcacatcgataaatatgtattcgacaacggtcagggcgggagcggacaacgtttcgactggtcactattaaatggtcaatcgcttggcaacgttctgctggcggggggcttaggcgcagataactgcgtggaagcggcacaaaccggctgcgccgggcttgattttaattctgctgtagagtcgcaaccgggtatcaaagacgcacgtcttttggcctcggttttccagacgctgcgcgcatattaaggaaaggaacaatgacaacattacttaacccctattttggtgagtttggcggcatgtacgtgccacaaatcctgatgcctgctctgcgccagctggaagaagcttttgtcagcgcgcaaaaagatcctgaatttcaggctcagttcaacgacctgctgaaaaactatgccgggcgtccaaccgcgctgaccaaatgccagaacattacagccgggacgaacaccacgctgtatctgaagcgcgaagatttgctgcacggcggcgcgcataaaactaaccaggtgctcggtcaggctttactggcgaagcggatgggtaaaactgaaattattgccgaaaccggtgccggtcagcatggcgtggcgtcggcccttgccagcgccctgctcggcctgaaatgccgaatttatatgggtgccaaagacgttgaacgccagtcgcccaacgttttccggatgcgcttaatgggtgcggaagtgatcccggtacatagcggttccgcgaccctgaaagatgcctgtaatgaggcgctacgcgactggtccggcagttatgaaaccgcgcactatatgctgggtaccgcagctggcccgcatccttacccgaccattgtgcgtgagtttcagcggatgattggcgaagaaacgaaagcgcagattctggaaagagaaggtcgcctgccggatgccgttatcgcctgtgttggcggtggttcgaatgccatcggtatgtttgcagatttcatcaacgaaaccgacgtcggcctgattggtgtggagcctggcggccacggtatcgaaactggcgagcacggcgcaccgttaaaacatggtcgcgtgggcatctatttcggtatgaaagcgccgatgatgcaaaccgaagacgggcaaattgaagagtcttactccatttctgccgggctggatttcccgtccgtcggcccgcaacatgcgtatctcaacagcactggacgcgctgattacgtgtctattaccgacgatgaagccctggaagcctttaaaacgctttgcctgcatgaagggatcatcccggcgctggaatcctcccacgccctggcccatgcgctgaaaatgatgcgcgaaaatccggaaaaagagcagctactggtggttaacctttccggtcgcggcgataaagacatcttcaccgttcacgatattttgaaagcacgaggggaaatctgatggaacgctacgaatctctgtttgcccagttgaaggagcgcaaagaaggcgcattcgttcctttcgtcaccctcggtgatccgggcattgagcagtcgttgaaaattatcgatacgctaattgaagccggtgctgacgcgctggagttaggcatccccttctccgacccactggcggatggcccgacgattcaaaacgccacactgcgtgcttttgcggcgggagtaaccccggcgcagtgctttgagatgctggcactcattcgccagaagcacccgaccattcccatcggccttttgatgtatgccaacctggtgtttaacaaaggcattgatgagttttatgccgagtgcgagaaagtcggcgtcgattcggtgctggttgccgatgtgcccgtggaagagtccgcgcccttccgccaggccgcgttgcgtcataatgtcgcacctatctttatttgcccgccgaatgccgacgatgatttgctgcgccagatagcctcttacggtcgtggttacacctatttgctgtcgcgagcgggcgtgaccggcgcagaaaaccgcgccgcgttacccctcaatcatctggttgcgaagctgaaagagtacaacgctgcgcctccattgcagggatttggtatttccgccccggatcaggtaaaagccgcgattgatgcaggagctgcgggcgcgatttctggttcggccatcgttaaaatcatcgagcaacatattaatgagccagagaaaatgctggcggcactgaaagcttttgtacaaccgatgaaagcggcgacgcgcagttaa

SEQ ID NO: 879 - DNA, 1562 bp, Artificial Sequence
  source: /note="Description of Artificial Sequence: Synthetic polynucleotide"
  source: /note="fbrTrpE"
atgcaaacacaaaaaccgactctcgaactgctaacctgcgaaggcgcttatcgcgacaacccgactgcgctttttcaccagttgtgtggggatcgtccggcaacgctgctgctggaattcgcagatatcgacagcaaagatgatttaaaaagcctgctgctggtagacagtgcgctgcgcattacagcattaagtgacactgtcacaatccaggcgctttccggcaatggagaagccctgttgacactactggataacgccttgcctgcgggtgtggaaaatgaacaatcaccaaactgccgcgtactgcgcttcccgcctgtcagtccactgctggatgaagacgcccgcttatgctccctttcggtttttgacgctttccgcttattacagaatctgttgaatgtaccgaaggaagaacgagaagcaatgttcttcggcggcctgttctcttatgaccttgtggcgggatttgaaaatttaccgcaactgtcagcggaaaatagctgccctgatttctgtttttatctcgctgaaacgctgatggtgattgaccatcagaaaaaaagcactcgtattcaggccagcctgtttgctccgaatgaagaagaaaaacaacgtctcactgctcgcctgaacgaactacgtcagcaactgaccgaagccgcgccgccgctgccggtggtttccgtgccgcatatgcgttgtgaatgtaaccagagcgatgaagagttcggtggtgtagtgcgtttgttgcaaaaagcgattcgcgccggagaaattttccaggtggtgccatctcgccgtttctctctgccctgcccgtcaccgctggcagcctattacgtgctgaaaaagagtaatcccagcccgtacatgttttttatgcaggataatgatttcaccctgtttggcgcgtcgccggaaagttcgctcaagtatgacgccaccagccgccagattgagatttacccgattgccggaacacgtccacgcggtcgtcgtgccgatggttcgctggacagagacctcgacagccgcatcgaactggagatgcgtaccgatcataaagagctttctgaacatctgatgctggtggatctcgcccgtaatgacctggcacgcatttgcacacccggcagccgctacgtcgccgatctcaccaaagttgaccgttactcttacgtgatgcacctagtctcccgcgttgttggtgagctgcgccacgatctcgacgccctgcacgcttaccgcgcctgtatgaatatggggacgttaagcggtgcaccgaaagtacgcgctatgcagttaattgccgaagcagaaggtcgtcgacgcggcagctacggcggcgcggtaggttattttaccgcgcatggcgatctcgacacctgcattgtgatccgctcggcgctggtggaaaacggtatcgccaccgtgcaagccggtgctggcgtagtccttgattctgttccgcagtcggaagccgacgaaactcgtaataaagcccgcgctgtactgcgcgctattgccaccgcgcatcatgcacaggagacgttcta

SEQ ID NO: 880 - DNA, 31 bp, Artificial Sequence
  source: /note="Description of Artificial Sequence: Synthetic oligonucleotide"
  source: /note="BBa_B0029"
tctagagttcacacaggaaacctactagatg

SEQ ID NO: 881 - DNA, 31 bp, Artificial Sequence
  source: /note="Description of Artificial Sequence: Synthetic oligonucleotide"
  source: /note="BBa_B0030"
tctagagattaaagaggagaaatactagatg

SEQ ID NO: 882 - DNA, 30 bp, Artificial Sequence
  source: /note="Description of Artificial Sequence: Synthetic oligonucleotide"
  source: /note="BBa_B0031"
tctagagtcacacaggaaacctactagatg

SEQ ID NO: 883 - DNA, 29 bp, Artificial Sequence
  source: /note="Description of Artificial Sequence: Synthetic oligonucleotide"
  source: /note="BBa_B0032"
tctagagtcacacaggaaagtactagatg

SEQ ID NO: 884 - DNA, 27 bp, Artificial Sequence
  source: /note="Description of Artificial Sequence: Synthetic oligonucleotide"
  source: /note="BBa_B0033"
tctagagtcacacaggactactagatg

SEQ ID NO: 885 - DNA, 28 bp, Artificial Sequence
  source: /note="Description of Artificial Sequence: Synthetic oligonucleotide"
  source: /note="BBa_B0034"
tctagagaaagaggagaaatactagatg

SEQ ID NO: 886 - DNA, 30 bp, Artificial Sequence
  source: /note="Description of Artificial Sequence: Synthetic oligonucleotide"
  source: /note="BBa_B0035"
tctagagattaaagaggagaatactagatg

SEQ ID NO: 887 - DNA, 28 bp, Artificial Sequence
  source: /note="Description of Artificial Sequence: Synthetic oligonucleotide"
  source: /note="BBa_B0064"
tctagagaaagaggggaaatactagatg

SEQ ID NO: 888 - DNA, 64 bp, Artificial Sequence; identical to SEQ ID NO: 744
  source: /note="Description of Artificial Sequence: Synthetic oligonucleotide"
  source: /note="SYN23119 promoter"

SEQ ID NO: 889 - DNA, 94 bp, Artificial Sequence
  source: /note="Description of Artificial Sequence: Synthetic oligonucleotide"
  source: /note="SYN23119 promoter with RBS"
ggaaaatttttttaaaaaaaaaacttgacagctagctcagtccttggtataatgctagcacgaagtgaattatataaaagtgggaggtgcccga

SEQ ID NO: 890 - DNA, 1225 bp, Artificial Sequence
  source: /note="Description of Artificial Sequence: Synthetic polynucleotide"
  source: /note="Pseudomonas fluorescens, codon optimized for expression in E. coli, driven by the SYN23119 Construct can be expressed from a plasmid, e.g., p15 or can be integrated into the chromosome, e.g., at the HA3/4 site"
ggaaaatttttttaaaaaaaaaacttgacagctagctcagtccttggtataatgctagcacgaagtgaattatataaaagtgggaggtgcccgaatgacgacccgaaatgattgcctagcgttggatgcacaggacagtctggctccgctgcgccaacaatttgcgctgccggagggtgtgatatacctggatggcaattcgctgggcgcacgtccggtagctgcgctggctcgcgcgcaggctgtgatcgcagaagaatggggcaacgggttgatccgttcatggaactctgcgggctggcgtgatctgtctgaacgcctgggtaatcgcctggctaccctgattggtgcgcgcgatggggaagtagttgttactgataccacctcgattaatctgtttaaagtgctgtcagcggcgctgcgcgtgcaagctacccgtagcccggagcgccgtgttatcgtgactgagacctcgaatttcccgaccgacctgtatattgcggaagggttggcggatatgctgcaacaaggttacactctgcgtttggtggattcaccggaagagctgccacaggctatagatcaggacaccgcggtggtgatgctgacgcacgtaaattataaaaccggttatatgcacgacatgcaggctctgaccgcgttgagccacgagtgtggggctctggcgatttgggatctggcgcactctgctggcgctgtgccggtggacctgcaccaagcgggcgcggactatgcgattggctgcacgtacaaatacctgaatggcggcccgggttcgcaagcgtttgtttgggtttcgccgcaactgtgcgacctggtaccgcagccgctgtctggttggttcggccatagtcgccaattcgcgatggagccgcgctacgaaccttctaacggcattgctcgctatctgtgcggcactcagcctattactagcttggctatggtggagtgcggcctggatgtgtttgcgcagacggatatggcttcgctgcgccgtaaaagtctggcgctgactgatctgttcatcgagctggttgaacaacgctgcgctgcacacgaactgaccctggttactccacgtgaacacgcgaaacgcggctctcacgtgtcttttgaacaccccgagggttacgctgttattcaagctctgattgatcgtggcgtgatcggcgattaccgtgagccacgtattatgcgtttcggt

SEQ ID NO: 891 - DNA, 66 bp, Artificial Sequence; identical to SEQ ID NO: 740
  source: /note="Description of Artificial Sequence: Synthetic oligonucleotide"
  source: /note="Lpp promoter from E. coli SEQ ID NO: 891"

SEQ ID NO: 892 - DNA, 96 bp, Artificial Sequence
  source: /note="Description of Artificial Sequence: Synthetic oligonucleotide"
  source: /note="Lpp promoter from E. coli SEQ ID NO: 892"
ataagtgccttcccatcaaaaaaatattctcaacataaaaaactttgtgtaatacttgtaacgctagtgaattatataaaagtgggaggtgcccga

SEQ ID NO: 893 - DNA, 1347 bp, Artificial Sequence
  source: /note="Description of Artificial Sequence: Synthetic polynucleotide"
  source: /note="Pseudomonas fluorescens kynureninase driven by Lpp promoter from E. coli SEQ ID NO: 893 Construct can be expressed from a plasmid, e.g., p15 or can be integrated into the chromosome, e.g., at the HA3/4 site"
ataagtgccttcccatcaaaaaaatattctcaacataaaaaactttgtgtaatacttgtaacgctagtgaattatataaaagtgggaggtgcccgaatgacgacccgaaatgattgcctagcgttggatgcacaggacagtctggctccgctgcgccaacaatttgcgctgccggagggtgtgatatacctggatggcaattcgctgggcgcacgtccggtagctgcgctggctcgcgcgcaggctgtgatcgcagaagaatggggcaacgggttgatccgttcatggaactctgcgggctggcgtgatctgtctgaacgcctgggtaatcgcctggctaccctgattggtgcgcgcgatggggaagtagttgttactgataccacctcgattaatctgtttaaagtgctgtcagcggcgctgcgcgtgcaagctacccgtagcccggagcgccgtgttatcgtgactgagacctcgaatttcccgaccgacctgtatattgcggaagggttggcggatatgctgcaacaaggttacactctgcgtttggtggattcaccggaagagctgccacaggctatagatcaggacaccgcggtggtgatgctgacgcacgtaaattataaaaccggttatatgcacgacatgcaggctctgaccgcgttgagccacgagtgtggggctctggcgatttgggatctggcgcactctgctggcgctgtgccggtggacctgcaccaagcgggcgcggactatgcgattggctgcacgtacaaatacctgaatggcggcccgggttcgcaagcgtttgtttgggtttcgccgcaactgtgcgacctggtaccgcagccgctgtctggttggttcggccatagtcgccaattcgcgatggagccgcgctacgaaccttctaacggcattgctcgctatctgtgcggcactcagcctattactagcttggctatggtggagtgcggcctggatgtgtttgcgcagacggatatggcttcgctgcgccgtaaaagtctggcgctgactgatctgttcatcgagctggttgaacaacgctgcgctgcacacgaactgaccctggttactccacgtgaacacgcgaaacgcggctctcacgtgtcttttgaacaccccgagggttacgctgttattcaagctctgattgatcgtggcgtgatcggcgattaccgtgagccacgtattatgcgtttcggtttcactcctctgtatactacttttacggaagtttgggatgcagtacaaatcctgggcgaaatcctggatcgtaagacttgggcgcaggctcagtttcaggtgcgccactctgttacttaa

SEQ ID NO: 894 - DNA, 138 bp, Artificial Sequence
  source: /note="Description of Artificial Sequence: Synthetic polynucleotide"
  source: /note="fliC-FliC20"
tgacggcgattgagccgacgggtggaaacccaaaacgtaatcaacgtgggtactccttaaattgggttcgaatggaccatggcacaagtcattaataccaacagcctctcgctgatcactcaaaataatatcaacaag

SEQ ID NO: 895 - DNA, 70 bp, Artificial Sequence
  source: /note="Description of Artificial Sequence: Synthetic oligonucleotide"
  source: /note="fliC-RBS"
tgacggcgattgagccgacgggtggaaacccaaaacgtaatcaactacgaacacttacaggaggtaccca

SEQ ID NO: 896 - DNA, 70 bp, Artificial Sequence
  source: /note="Description of Artificial Sequence: Synthetic oligonucleotide"
  source: /note="fliC-RBS"
tgacggcgattgagccgacgggtggaaacccaaaacgtaatcaacaagtataaactctgggaggttccta

SEQ ID NO: 897 - DNA, 70 bp, Artificial Sequence
  source: /note="Description of Artificial Sequence: Synthetic oligonucleotide"
  source: /note="fliC-RBS"
tgacggcgattgagccgacgggtggaaacccaaaacgtaatcaactcaaatcccttaataaggaggtaaa

SEQ ID NO: 898 - DNA, 106 bp, Artificial Sequence
  source: /note="Description of Artificial Sequence: Synthetic polynucleotide"
  source: /note="RBS-phoA"
ctctagaaataattttgtttaactttaagaaggagatatacatatgaaacaaagcactattgcactggcactcttaccgttactgtttacccctgtgacaaaagcg

SEQ ID NO: 899 - DNA, 63 bp, Artificial Sequence
  source: /note="Description of Artificial Sequence: Synthetic oligonucleotide"
  source: /note="phoA"
atgaaacaaagcactattgcactggcactcttaccgttactgtttacccctgtgacaaaagcg

SEQ ID NO: 900 - DNA, 109 bp, Artificial Sequence
  source: /note="Description of Artificial Sequence: Synthetic polynucleotide"
  source: /note="RBS-ompF"
ctctagaaataattttgtttaactttaagaaggagatatacatatgatgaagcgcaatattctggcagtgatcgtccctgctctgttagtagcaggtactgcaaacgct

SEQ ID NO: 901 - DNA, 66 bp, Artificial Sequence
  source: /note="Description of Artificial Sequence: Synthetic oligonucleotide"
  source: /note="ompF"
atgatgaagcgcaatattctggcagtgatcgtccctgctctgttagtagcaggtactgcaaacgct

SEQ ID NO: 902 - DNA, 88 bp, Artificial Sequence
  source: /note="Description of Artificial Sequence: Synthetic oligonucleotide"
  source: /note="RBS-cvaC"
ctctagaaataattttgtttaactttaagaaggagatatacatatgagaactctgactctaaatgaattagattctgtttctggtggt

SEQ ID NO: 903 - DNA, 45 bp, Artificial Sequence
  source: /note="Description of Artificial Sequence: Synthetic oligonucleotide"
  source: /note="cvaC"
atgagaactctgactctaaatgaattagattctgtttctggtggt

SEQ ID NO: 904 - DNA, 88 bp, Artificial Sequence
  source: /note="Description of Artificial Sequence: Synthetic oligonucleotide"
  source: /note="RBS-phoA (Optimized)"
gacgccagagagttaagggggttaaatgaaacaatcgaccatcgcattggcgctgcttcctctattgttcacaccggtgacaaaggca

SEQ ID NO: 905 - DNA, 63 bp, Artificial Sequence
  source: /note="Description of Artificial Sequence: Synthetic oligonucleotide"
  source: /note="Optimized phoA"
atgaaacaatcgaccatcgcattggcgctgcttcctctattgttcacaccggtgacaaaggca

SEQ ID NO: 906 - DNA, 160 bp, Artificial Sequence
  source: /note="Description of Artificial Sequence: Synthetic polynucleotide"
  source: /note="RBS-TorA"
ctctagaaataattttgtttaactttaagaaggagatatacatatgaacaataacgatctctttcaggcatcacgtcggcgttttctggcacaactcggcggcttaaccgtcgccgggatgctggggccgtcattgttaacgccgcgacgtgcgactgcg

SEQ ID NO: 907 - DNA, 117 bp, Artificial Sequence
  source: /note="Description of Artificial Sequence: Synthetic polynucleotide"
  source: /note="TorA"
atgaacaataacgatctctttcaggcatcacgtcggcgttttctggcacaactcggcggcttaaccgtcgccgggatgctggggccgtcattgttaacgccgcgacgtgcgactgcg

SEQ ID NO: 908 - DNA, 148 bp, Artificial Sequence
  source: /note="Description of Artificial Sequence: Synthetic polynucleotide"
  source: /note="RBS-TorA alternate"
cccacattcgaggtactaaatgaacaataacgatctctttcaggcatcacgtcggcgttttctggcacaactcggcggcttaaccgtcgccgggatgctggggacgtcattgttaacgccgcgccgtgcgactgcggcgcaagcggcg

SEQ ID NO: 909 - DNA, 129 bp, Artificial Sequence
  source: /note="Description of Artificial Sequence: Synthetic polynucleotide"
  source: /note="TorA (alternate)"
atgaacaataacgatctctttcaggcatcacgtcggcgttttctggcacaactcggcggcttaaccgtcgccgggatgctggggacgtcattgttaacgccgcgccgtgcgactgcggcgcaagcggcg

SEQ ID NO: 910 - DNA, 130 bp, Artificial Sequence
  source: /note="Description of Artificial Sequence: Synthetic polynucleotide"
  source: /note="RBS-fdnG"
accctattacacacctaaggaggccaaatacatggacgtcagtcgcagacaattttttaaaatctgcgcgggcggtatggcgggaacaacagtagcagcattgggctttgccccgaagcaagcactggct

SEQ ID NO: 911 - DNA, 99 bp, Artificial Sequence
  source: /note="Description of Artificial Sequence: Synthetic oligonucleotide"
  source: /note="fdnG"
atggacgtcagtcgcagacaattttttaaaatctgcgcgggcggtatggcgggaacaacagtagcagcattgggctttgccccgaagcaagcactggct

SEQ ID NO: 912 - DNA, 168 bp, Artificial Sequence
  source: /note="Description of Artificial Sequence: Synthetic polynucleotide"
  source: /note="RBS-dmsA"
tacgcaaaaaacataatttaagagaggataaacatgaaaacgaaaatccctgatgcggtattggctgctgaggtgagtcgccgtggtttggtaaaaacgacagcgatcggcggcctggcaatggccagcagcgcattaacattaccttttagtcggattgcgcacgct

SEQ ID NO: 913 - DNA, 135 bp, Artificial Sequence
  source: /note="Description of Artificial Sequence: Synthetic polynucleotide"
  source: /note="dmsA"
atgaaaacgaaaatccctgatgcggtattggctgctgaggtgagtcgccgtggtttggtaaaaacgacagcgatcggcggcctggcaatggccagcagcgcattaacattaccttttagtcggattgcgcacgct

SEQ ID NO: 914 - DNA, 712 bp, Artificial Sequence
  source: /note="Description of Artificial Sequence: Synthetic polynucleotide"
  source: /note="TetR/TetA Promoter"
gaattcgttaagacccactttcacatttaagttgtttttctaatccgcatatgatcaattcaaggccgaataagaaggctggctctgcaccttggtgatcaaataattcgatagcttgtcgtaataatggcggcatactatcagtagtaggtgtttccctttcttctttagcgacttgatgctcttgatcttccaatacgcaacctaaagtaaaatgccccacagcgctgagtgcatataatgcattctctagtgaaaaaccttgttggcataaaaaggctaattgattttcgagagtttcatactgtttttctgtaggccgtgtacctaaatgtacttttgctccatcgcgatgacttagtaaagcacatctaaaacttttagcgttattacgtaaaaaatcttgccagctttccccttctaaagggcaaaagtgagtatggtgcctatctaacatctcaatggctaaggcgtcgagcaaagcccgcttattttttacatgccaatacaatgtaggctgctctacacctagcttctgggcgagtttacgggttgttaaaccttcgattccgacctcattaagcagctctaatgcgctgttaatcactttacttttatctaatctagacatcattaattcctaatttttgttgacactctatcattgatagagttattttaccactccctatcagtgatagagaaaagtgaa

SEQ ID NO: 915 - DNA, 104 bp, Artificial Sequence; identical to SEQ ID NO: 801
  source: /note="Description of Artificial Sequence: Synthetic polynucleotide"
  source: /note="fliC Promoter"

SEQ ID NO: 916 - DNA, 162 bp, Artificial Sequence
  source: /note="Description of Artificial Sequence: Synthetic polynucleotide"
  source: /note="FnrS Promoter"
ggtaccagttgttcttattggtggtgttgctttatggttgcatcgtagtaaatggttgtaacaaaagcaatttttccggctgtctgtatacaaaaacgccgcaaagtttgagcgaagtcaataaactctctacccattcagggcaatatctctcttggatcc

SEQ ID NO: 917 - DNA, 358 bp, Artificial Sequence
  source: /note="Description of Artificial Sequence: Synthetic polynucleotide"
  source: /note="DOM Construct Terminator"
cacatttccccgaaaagtgccgatggccccccgatggtagtgtggcccatgcgagagtagggaactgccaggcatcaaataaaacgaaaggctcagtcgaaagactgggcctttcgttttatctgttgtttgtcggtgaacgctctcctgagtaggacaaatccgccgggagcggatttgaacgttgcgaagcaacggcccggagggtggcgggcaggacgcccgccataaactgccaggcatcaaattaagcagaaggccatcctgacggatggcctttttgcgtggccagtgccaagcttgcatgcagattgcagcattacacgtcttgagcgattgtgtaggctggagctgcttc

SEQ ID NO: 918 - DNA, 48 bp, Artificial Sequence
  source: /note="Description of Artificial Sequence: Synthetic oligonucleotide"
  source: /note="FRT Site"
gaagttcctatactttctagagaataggaacttcggaataggaacttc

SEQ ID NO: 919 - DNA, 1345 bp, Artificial Sequence
  source: /note="Description of Artificial Sequence: Synthetic polynucleotide"
  source: /note="Kanamycin Resistance Cassette (for integration in between FRT sites)"
aagatcccctcacgctgccgcaagcactcagggcgcaagggctgctaaaggaagcggaacacgtagaaagccagtccgcagaaacggtgctgaccccggatgaatgtcagctactgggctatctggacaagggaaaacgcaagcgcaaagagaaagcaggtagcttgcagtgggcttacatggcgatagctagactgggcggttttatggacagcaagcgaaccggaattgccagctggggcgccctctggtaaggttgggaagccctgcaaagtaaactggatggctttcttgccgccaaggatctgatggcgcaggggatcaagatctgatcaagagacaggatgaggatcgtttcgcatgattgaacaagatggattgcacgcaggttctccggccgcttgggtggagaggctattcggctatgactgggcacaacagacaatcggctgctctgatgccgccgtgttccggctgtcagcgcaggggcgcccggttctttttgtcaagaccgacctgtccggtgccctgaatgaactgcaggacgaggcagcgcggctatcgtggctggccacgacgggcgttccttgcgcagctgtgctcgacgttgtcactgaagcgggaagggactggctgctattgggcgaagtgccggggcaggatctcctgtcatctcaccttgctcctgccgagaaagtatccatcatggctgatgcaatgcggcggctgcatacgcttgatccggctacctgcccattcgaccaccaagcgaaacatcgcatcgagcgagcacgtactcggatggaagccggtcttgtcgatcaggatgatctggacgaagagcatcaggggctcgcgccagccgaactgttcgccaggctcaaggcgcgcatgcccgacggcgaggatctcgtcgtgacccatggcgatgcctgcttgccgaatatcatggtggaaaatggccgcttttctggattcatcgactgtggccggctgggtgtggcggaccgctatcaggacatagcgttggctacccgtgatattgctgaagagcttggcggcgaatgggctgaccgcttcctcgtgctttacggtatcgccgctcccgattcgcagcgcatcgccttctatcgccttcttgacgagttcttctgagcgggactctggggttcgaaatgaccgaccaagcgacgcccaacctgccatcacgagatttcgattccaccgccgccttctatgaaaggttgggcttcggaatcgttttccgggacgccggctggatgatcctccagcgcggggatctcatgctggagttcttcgcccaccccagcttcaaaagcgctct

SEQ ID NO: 920 - protein, 219 aa, Artificial Sequence
  source: /note="Description of Artificial Sequence: Synthetic polypeptide"
  source: /note="human IL-12a construct with a N terminal OmpF secretion tag (sec-dependent secretion system)"
MMKRNILAVIVPALLVAGTANARNLPVATPDPGMFPCLHHSQNLLRAVSNMLQKARQTLEFYPCTSEEIDHEDITKDKTSTVEACLPLELTKNESCLNSRETSFITNGSCLASRKTSFMMALCLSSIYEDLKMYQVEFKTMNAKLLMDPKRQIFLDQNMLAVIDELMQALNFNSETVPQKSSLEEPDFYKTKIKLCILLHAFRIRAVTIDRVMSYLNAS

SEQ ID NO: 921 - protein, 218 aa, Artificial Sequence
  source: /note="Description of Artificial Sequence: Synthetic polypeptide"
  source: /note="human IL-12a construct with a N terminal PhoA secretion"
MKQSTIALALLPLLFTPVTKARNLPVATPDPGMFPCLHHSQNLLRAVSNMLQKARQTLEFYPCTSEEIDHEDITKDKTSTVEACLPLELTKNESCLNSRETSFITNGSCLASRKTSFMMALCLSSIYEDLKMYQVEFKTMNAKLLMDPKRQIFLDQNMLAVIDELMQALNFNSETVPQKSSLEEPDFYKTKIKLCILLHAFRIRAVTIDRVMSYLNAS

SEQ ID NO: 922 - protein, 236 aa, Artificial Sequence
  source: /note="Description of Artificial Sequence: Synthetic polypeptide"
  source: /note="human IL-12a construct with a N terminal TorA secretion tag (sec-dependent secretion system)"
MNNNDLFQASRRRFLAQLGGLTVAGMLGPSLLTPRRATARNLPVATPDPGMFPCLHHSQNLLRAVSNMLQKARQTLEFYPCTSEEIDHEDITKDKTSTVEACLPLELTKNESCLNSRETSFITNGSCLASRKTSFMMALCLSSIYEDLKMYQVEFKTMNAKLLMDPKRQIFLDQNMLAVIDELMQALNFNSETVPQKSSLEEPDFYKTKIKLCILLHAFRIRAVTIDRVMSYLNAS

SEQ ID NO: 923 - protein, 328 aa, Artificial Sequence
  source: /note="Description of Artificial Sequence: Synthetic polypeptide"
  source: /note="human IL-12b construct with a N terminal OmpF secretion tag (sec-dependent secretion system)"
MMKRNILAVIVPALLVAGTANAIWELKKDVYVVELDWYPDAPGEMVVLTCDTPEEDGITWTLDQSSEVLGSGKTLTIQVKEFGDAGQYTCHKGGEVLSHSLLLLHKKEDGIWSTDILKDQKEPKNKTFLRCEAKNYSGRFTCWWLTTISTDLTFSVKSSRGSSDPQGVTCGAATLSAERVRGDNKEYEYSVECQEDSACPAAEESLPIEVMVDAVHKLKYENYTSSFFIRDIIKPDPPKNLQLKPLKNSRQVEVSWEYPDTWSTPHSYFSLTFCVQVQGKSKREKKDRVFTDKTSATVICRKNASISVRAQDRYYSSSWSEWASVPCS

SEQ ID NO: 924 - protein, 327 aa, Artificial Sequence
  source: /note="Description of Artificial Sequence: Synthetic polypeptide"
  source: /note="human IL-12b construct with a N terminal PhoA secretion tag"
MKQSTIALALLPLLFTPVTKAIWELKKDVYVVELDWYPDAPGEMVVLTCDTPEEDGITWTLDQSSEVLGSGKTLTIQVKEFGDAGQYTCHKGGEVLSHSLLLLHKKEDGIWSTDILKDQKEPKNKTFLRCEAKNYSGRFTCWWLTTISTDLTFSVKSSRGSSDPQGVTCGAATLSAERVRGDNKEYEYSVECQEDSACPAAEESLPIEVMVDAVHKLKYENYTSSFFIRDIIKPDPPKNLQLKPLKNSRQVEVSWEYPDTWSTPHSYFSLTFCVQVQGKSKREKKDRVFTDKTSATVICRKNASISVRAQDRYYSSSWSEWASVPCS

SEQ ID NO: 925 - protein, 345 aa, Artificial Sequence
  source: /note="Description of Artificial Sequence: Synthetic polypeptide"
  source: /note="human IL-12 construct with a N terminal TorA secretion tag (sec-dependent secretion system)"
MNNNDLFQASRRRFLAQLGGLTVAGMLGPSLLTPRRATAIWELKKDVYVVELDWYPDAPGEMVVLTCDTPEEDGITWTLDQSSEVLGSGKTLTIQVKEFGDAGQYTCHKGGEVLSHSLLLLHKKEDGIWSTDILKDQKEPKNKTFLRCEAKNYSGRFTCWWLTTISTDLTFSVKSSRGSSDPQGVTCGAATLSAERVRGDNKEYEYSVECQEDSACPAAEESLPIEVMVDAVHKLKYENYTSSFFIRDIIKPDPPKNLQLKPLKNSRQVEVSWEYPDTWSTPHSYFSLTFCVQVQGKSKREKKDRVFTDKTSATVICRKNASISVRAQDRYYSSSWSEWASVPCS

SEQ ID NO: 926 - protein, 219 aa, Artificial Sequence; identical to SEQ ID NO: 920
  source: /note="Description of Artificial Sequence: Synthetic polypeptide"
  source: /note="murine IL-12a construct with a N terminal OmpF secretion tag (sec-dependent secretion system)"

SEQ ID NO: 927 - protein, 218 aa, Artificial Sequence; identical to SEQ ID NO: 921
  source: /note="Description of Artificial Sequence: Synthetic polypeptide"
  source: /note="murine IL-12a construct with a N terminal PhoA secretion tag"

SEQ ID NO: 928 - protein, 236 aa, Artificial Sequence; identical to SEQ ID NO: 922
  source: /note="Description of Artificial Sequence: Synthetic polypeptide"
  source: /note="murine IL-12a construct with a N terminal TorA secretion tag (sec-dependent secretion system)"

SEQ ID NO: 929 - protein, 335 aa, Artificial Sequence
  source: /note="Description of Artificial Sequence: Synthetic polypeptide"
  source: /note="murine IL-12b construct with a N terminal OmpF secretion tag (sec-dependent secretion system)"
MMKRNILAVIVPALLVAGTANAMWELEKDVYVVEVDWTPDAPGETVNLTCDTPEEDDITWTSDQRHGVIGSGKTLTITVKEFLDAGQYTCHKGGETLSHSHLLLHKKENGIWSTEILKNFKNKTFLKCEAPNYSGRFTCSWLVQRNMDLKFNIKSSSSSPDSRAVTCGMASLSAEKVTLDQRDYEKYSVSCQEDVTCPTAEETLPIELALEARQQNKYENYSTSFFIRDIIKPDPPKNLQMKPLKNSQVEVSWEYPDSWSTPHSYFSLKFFVRIQRKKEKMKETEEGCNQKGAFLVEKTSTEVQCKGGNVCVQAQDRYYNSSCSKWACVPCRVRS

SEQ ID NO: 930 - protein, 334 aa, Artificial Sequence
  source: /note="Description of Artificial Sequence: Synthetic polypeptide"
  source: /note="murine IL-12b construct with a N terminal PhoA secretion tag"
MKQSTIALALLPLLFTPVTKAMWELEKDVYVVEVDWTPDAPGETVNLTCDTPEEDDITWTSDQRHGVIGSGKTLTITVKEFLDAGQYTCHKGGETLSHSHLLLHKKENGIWSTEILKNFKNKTFLKCEAPNYSGRFTCSWLVQRNMDLKFNIKSSSSSPDSRAVTCGMASLSAEKVTLDQRDYEKYSVSCQEDVTCPTAEETLPIELALEARQQNKYENYSTSFFIRDIIKPDPPKNLQMKPLKNSQVEVSWEYPDSWSTPHSYFSLKFFVRIQRKKEKMKETEEGCNQKGAFLVEKTSTEVQCKGGNVCVQAQDRYYNSSCSKWACVPCRVRS

SEQ ID NO: 931 - protein, 352 aa, Artificial Sequence
  source: /note="Description of Artificial Sequence: Synthetic polypeptide"
  source: /note="murine IL-12b construct with a N terminal TorA secretion tag (sec-dependent secretion system)"
MNNNDLFQASRRRFLAQLGGLTVAGMLGPSLLTPRRATAMWELEKDVYVVEVDWTPDAPGETVNLTCDTPEEDDITWTSDQRHGVIGSGKTLTITVKEFLDAGQYTCHKGGETLSHSHLLLHKKENGIWSTEILKNFKNKTFLKCEAPNYSGRFTCSWLVQRNMDLKFNIKSSSSSPDSRAVTCGMASLSAEKVTLDQRDYEKYSVSCQEDVTCPTAEETLPIELALEARQQNKYENYSTSFFIRDIIKPDPPKNLQMKPLKNSQVEVSWEYPDSWSTPHSYFSLKFFVRIQRKKEKMKETEEGCNQKGAFLVEKTSTEVQCKGGNVCVQAQDRYYNSSCSKWACVPCRVRS

SEQ ID NO: 932 - protein, 149 aa, Artificial Sequence
  source: /note="Description of Artificial Sequence: Synthetic polypeptide"
  source: /note="human GMCSF construct with a N terminal OmpF secretion tag (sec-dependent secretion system)"
MMKRNILAVIVPALLVAGTANAAPARSPSPSTQPWEHVNAIQEARRLLNLSRDTAAEMNETVEVISEMFDLQEPTCLQTRLELYKQGLRGSLTKLKGPLTMMASHYKQHCPPTPETSCATQIITFESFKENLKDFLLVIPFDCWEPVQE

SEQ ID NO: 933 - protein, 148 aa, Artificial Sequence
  source: /note="Description of Artificial Sequence: Synthetic polypeptide"
  source: /note="human GMCSF construct with a N terminal PhoA secretion tag"
MKQSTIALALLPLLFTPVTKAAPARSPSPSTQPWEHVNAIQEARRLLNLSRDTAAEMNETVEVISEMFDLQEPTCLQTRLELYKQGLRGSLTKLKGPLTMMASHYKQHCPPTPETSCATQIITFESFKENLKDFLLVIPFDCWEPVQE

SEQ ID NO: 934 - protein, 166 aa, Artificial Sequence
  source: /note="Description of Artificial Sequence: Synthetic polypeptide"
  source: /note="human GMCSF construct with a N terminal TorA secretion tag (sec-dependent secretion system)"
MNNNDLFQASRRRFLAQLGGLTVAGMLGPSLLTPRRATAAPARSPSPSTQPWEHVNAIQEARRLLNLSRDTAAEMNETVEVISEMFDLQEPTCLQTRLELYKQGLRGSLTKLKGPLTMMASHYKQHCPPTPETSCATQIITFESFKENLKDFLLVIPFDCWEPVQE

SEQ ID NO: 935 - protein, 136 aa, Artificial Sequence
  source: /note="Description of Artificial Sequence: Synthetic polypeptide"
  source: /note="human Il-15 construct with a N terminal OmpF secretion tag (sec-dependent secretion system)"
MMKRNILAVIVPALLVAGTANANWVNVISDLKKIEDLIQSMHIDATLYTESDVHPSCKVTAMKCFLLELQVISLESGDASIHDTVENLIILANNSLSSNGNVTESGCKECEELEEKNIKEFLQSFVHIVQMFINTS

SEQ ID NO: 936 - protein, 135 aa, Artificial Sequence
  source: /note="Description of Artificial Sequence: Synthetic polypeptide"
  source: /note="human Il-15 construct with a N terminal PhoA secretion tag"
MKQSTIALALLPLLFTPVTKANWVNVISDLKKIEDLIQSMHIDATLYTESDVHPSCKVTAMKCFLLELQVISLESGDASIHDTVENLIILANNSLSSNGNVTESGCKECEELEEKNIKEFLQSFVHIVQMFINTS

SEQ ID NO: 937 - protein, 153 aa, Artificial Sequence
  source: /note="Description of Artificial Sequence: Synthetic polypeptide"
  source: /note="human Il-15 construct with a N terminal TorA secretion tag (sec-dependent secretion system)"
MNNNDLFQASRRRFLAQLGGLTVAGMLGPSLLTPRRATANWVNVISDLKKIEDLIQSMHIDATLYTESDVHPSCKVTAMKCFLLELQVISLESGDASIHDTVENLIILANNSLSSNGNVTESGCKECEELEEKNIKEFLQSFVHIVQMFINTS

SEQ ID NO: 938 - protein, 199 aa, Artificial Sequence
  source: /note="Description of Artificial Sequence: Synthetic polypeptide"
  source: /note="human TNFa construct with a N terminal OmpF secretion tag (sec-dependent secretion system)"
MMKRNILAVIVPALLVAGTANAGPQREEFPRDLSLISPLAQAVRSSSRTPSDKPVAHVVANPQAEGQLQWLNRRANALLANGVELRDNQLVVPSEGLYLIYSQVLFKGQGCPSTHVLLTHTISRIAVSYQTKVNLLSAIKSPCQRETPEGAEAKPWYEPIYLGGVFQLEKGDRLSAEINRPDYLDFAESGQVYFGIIAL

SEQ ID NO: 939 - protein, 198 aa, Artificial Sequence
  source: /note="Description of Artificial Sequence: Synthetic polypeptide"
  source: /note="human TNFa construct with a N terminal PhoA secretion tag"
MKQSTIALALLPLLFTPVTKAGPQREEFPRDLSLISPLAQAVRSSSRTPSDKPVAHVVANPQAEGQLQWLNRRANALLANGVELRDNQLVVPSEGLYLIYSQVLFKGQGCPSTHVLLTHTISRIAVSYQTKVNLLSAIKSPCQRETPEGAEAKPWYEPIYLGGVFQLEKGDRLSAEINRPDYLDFAESGQVYFGIIAL

SEQ ID NO: 940 - protein, 216 aa, Artificial Sequence
  source: /note="Description of Artificial Sequence: Synthetic polypeptide"
  source: /note="human TNFa construct with a N terminal TorA secretion tag (sec-dependent secretion system)"
MNNNDLFQASRRRFLAQLGGLTVAGMLGPSLLTPRRATAGPQREEFPRDLSLISPLAQAVRSSSRTPSDKPVAHVVANPQAEGQLQWLNRRANALLANGVELRDNQLVVPSEGLYLIYSQVLFKGQGCPSTHVLLTHTISRIAVSYQTKVNLLSAIKSPCQRETPEGAEAKPWYEPIYLGGVFQLEKGDRLSAEINRPDYLDFAESGQVYFGIIAL

SEQ ID NO: 941 - protein, 160 aa, Artificial Sequence
  source: /note="Description of Artificial Sequence: Synthetic polypeptide"
  source: /note="human IFNg construct with a N terminal OmpF secretion tag (sec-dependent secretion system)"
MMKRNILAVIVPALLVAGTANAQDPYVKEAENLKKYFNAGHSDVADNGTLFLGILKNWKEESDRKIMQSQIVSFYFKLFKNFKDDQSIQKSVETIKEDMNVKFFNSNKKKRDDFEKLTNYSVTDLNVQRKAIHELIQVMAELSPAAKTGKRKRSQMLFRG

SEQ ID NO: 942 - protein, 159 aa, Artificial Sequence
  source: /note="Description of Artificial Sequence: Synthetic polypeptide"
  source: /note="human IFNg construct with a N terminal PhoA secretion tag"
MKQSTIALALLPLLFTPVTKAQDPYVKEAENLKKYFNAGHSDVADNGTLFLGILKNWKEESDRKIMQSQIVSFYFKLFKNFKDDQSIQKSVETIKEDMNVKFFNSNKKKRDDFEKLTNYSVTDLNVQRKAIHELIQVMAELSPAAKTGKRKRSQMLFRG

SEQ ID NO: 943 - protein, 177 aa, Artificial Sequence
  source: /note="Description of Artificial Sequence: Synthetic polypeptide"
  source: /note="human IFNg construct with a N terminal TorA secretion tag (sec-dependent secretion system)"
MNNNDLFQASRRRFLAQLGGLTVAGMLGPSLLTPRRATAQDPYVKEAENLKKYFNAGHSDVADNGTLFLGILKNWKEESDRKIMQSQIVSFYFKLFKNFKDDQSIQKSVETIKEDMNVKFFNSNKKKRDDFEKLTNYSVTDLNVQRKAIHELIQVMAELSPAAKTGKRKRSQMLFRG

SEQ ID NO: 944-952 - skipped (9 entries)

SEQ ID NO: 953 - DNA, 657 bp, Artificial Sequence
  source: /note="Description of Artificial Sequence: Synthetic polynucleotide"
  source: /note="human IL-12a construct with a N terminal PhoA secretion tag"
atgaaacagagcacaattgctctggccttgttgccattactgtttacccctgttactaaggctaggaacctgcctgtggcaacaccagaccctgggatgttcccttgcttacatcattcccagaacctgttgcgtgcggtgtctaacatgctgcagaaagccaggcagacgctggaattctacccatgcacttccgaagagatagatcatgaagacattacgaaagacaaaacctcaacggttgaagcatgcttacctctggaattgactaagaatgaatcgtgcttaaactcaagagagaccagtttcatcactaatggctcttgcttagcgtcgcgcaagaccagcttcatgatggcgctctgcctaagtagcatctacgaggacctcaaaatgtaccaagttgaatttaaaactatgaatgccaaacttctaatggacccaaaaagacagatatttttagatcagaatatgcttgcggttattgacgaactcatgcaggcattgaattttaattccgagacggtgccacaaaaaagttctttggaggagccggacttttacaagacaaaaatcaagctgtgcatacttcttcacgcattcagaatacgggccgttacgatcgatcgcgtcatgtcgtatcttaatgcgagctga

SEQ ID NO: 954 - DNA, 987 bp, Artificial Sequence
  source: /note="Description of Artificial Sequence: Synthetic polynucleotide"
  source: /note="human IL-12b construct with a N terminal PhoA secretion tag"
atgaagcagagcacgatcgcattggcgttgctaccgctgttgtttaccccggtcacaaaagccatctgggaactgaaaaaagatgtttatgtagttgaactggattggtacccggatgcacccggtgagatggtggttttgacctgcgacacgccggaagaagatggcataacgtggaccctggatcaaagctctgaagttctgggttcaggtaagacattgacgatccaagtaaaagaatttggcgacgcaggtcagtacacctgccacaaaggtggcgaagttctgtcgcactcactcctgctcctgcacaaaaaagaggatggcatctggagtactgatatcctaaaggatcaaaaagaacctaaaaacaaaacgttcttgcgctgtgaagcgaagaactatagtggtcgctttacgtgctggtggttgactaccatttccaccgatttgaccttttctgttaagagttcgcgcggctcgtcagatccgcagggcgttacttgcggtgcggcgacgctgtcagctgagagagttcgtggggacaacaaagagtacgaatatagtgtagaatgtcaagaggattcggcgtgcccggcagcagaggagtctctccccattgaagttatggtggacgcagtgcataaactgaaatatgagaattacacatcaagcttttttattcgcgatatcatcaaaccggatcctccaaaaaatctgcaactaaagcccctgaaaaattcgcgccaagttgaggtgagctgggaatatccggatacttggtcgacaccgcattcttatttctcactgaccttctgcgttcaggttcaaggtaaatcaaaacgagaaaaaaaggatcgcgtctttaccgacaaaacgtctgctactgtaatctgccgcaagaatgcgtcaatttctgtacgtgcgcaagatcgctactactctagtagttggtctgaatgggcttcagtgccatgctcctgatga

SEQ ID NO: 955 - DNA, 657 bp, Artificial Sequence
  source: /note="Description of Artificial Sequence: Synthetic polynucleotide"
  source: /note="murine IL-12a construct with a N terminal PhoA secretion tag"
atgaaacagagtacgatagccctagccctgttgccgctcctgttcacccccgttactaaagcacgtaaccttccggtggccacgccagatccgggcatgttcccgtgcttacaccattcccagaatctgctgcgcgctgtgagtaatatgctgcagaaggcgagacaaactttggaattttacccgtgcacttcggaggagattgaccatgaggatatcacaaaagacaaaaccagtacagtggaagcctgcctgccccttgaactgactaaaaatgagagttgtttaaattcacgcgaaaccagcttcattactaacggaagctgcttagcatcgcggaaaaccagttttatgatggccctttgcctttcatctatttacgaggaccttaaaatgtatcaagttgaatttaagactatgaacgcgaaactgctaatggatcccaagcgacaaatctttcttgatcaaaatatgttggctgttattgatgaactgatgcaagccctgaattttaactcagaaaccgtacctcagaaatcgagtttagaagaacccgatttctacaaaactaaaatcaagttgtgtatccttttacatgccttccggattcgggccgtcactattgatcgcgtgatgtcgtacttgaatgcctcctaa

SEQ ID NO: 956 - DNA, 1005 bp, Artificial Sequence
  source: /note="Description of Artificial Sequence: Synthetic polynucleotide"
  source: /note="murine IL-12b construct with a N terminal PhoA secretion tag"
atgaaacagagcacgatcgcacttgcccttttgccgctgttatttaccccagtgacgaaagccatgtgggaattggaaaaagacgtgtatgttgttgaagttgactggactccggacgcgcctggtgaaactgttaatctgacttgtgatacaccggaggaagatgatataacttggactagcgatcaacgacacggcgtaatcggctctggtaagactttgaccattactgtgaaggaattcttggatgcggggcaatatacgtgtcataaaggcggcgagacgctgtcacactctcacctgttgttacataaaaaagagaatggtatatggtctacggagatcttgaaaaactttaaaaacaaaacttttttgaagtgtgaggctccaaactattctggtcgctttacctgtagttggttggtgcaacgtaacatggatctcaaatttaacataaagtcgtcttcgtcttctcccgatagccgagcggttacctgtggcatggctagtttgtcggcggagaaggtgaccttggatcaacgtgattatgaaaaatatagcgtttcgtgccaagaggacgttacgtgccctaccgctgaagagactttgccgattgaattggcactggaagcacgacaacaaaataaatacgagaattactcaactagtttcttcatccgagatatcataaaaccggaccccccgaagaatctgcaaatgaaaccgcttaaaaattcacaggtagaggtttcgtgggagtacccggatagttggtctacgcctcattcgtattttagcctgaaatttttcgttcgaatacagcgaaaaaaagagaagatgaaagaaactgaagaagggtgtaaccaaaaaggtgcatttctggtggagaaaactagcaccgaggttcaatgcaaaggcggtaacgtgtgcgtacaagctcaagaccgttattataacagtagctgttctaaatgggcttgcgtgccctgccgcgtgagatcatga

SEQ ID NO: 957 - DNA, 408 bp, Artificial Sequence
  source: /note="Description of Artificial Sequence: Synthetic polynucleotide"
  source: /note="human Il-15 construct with a N terminal PhoA secretion tag"
atgaagcaatctacgatcgcactagcgttactgccgttattgtttactcctgtgactaaggctaattgggttaatgttatatctgatttgaaaaaaatagaggatctgattcaatcaatgcacatagatgcgactctgtatactgagagcgatgtgcacccgagttgcaaagttactgctatgaaatgttttctgctggagctgcaagttatctctctggagagtggtgatgcgtctattcacgatactgttgagaatctgattattctggctaataactcgctgtcaagtaatgggaatgttacggaatctggctgtaaggagtgtgaagaattagaagaaaaaaatattaaagagtttctgcagagttttgtgcacattgttcagatgtttatcaatactagctga

SEQ ID NO: 958 - DNA, 447 bp, Artificial Sequence
  source: /note="Description of Artificial Sequence: Synthetic polynucleotide"
  source: /note="human GMCSF construct with a N terminal PhoA secretion tag"
atgaagcaatctacgatcgcgttggccttactgcccctgttattcacacccgtgaccaaagcggcaccggcccgcagcccatcaccgtcaactcaaccttgggaacatgtaaatgctattcaagaagctcgccgcctgttgaatttgagtcgcgatactgcagcagagatgaatgagactgtagaggtgatttcagaaatgtttgacctgcaggagccgacttgtttgcaaactcgcctggagctgtacaaacaaggcctgcgtggctcgctgactaaactgaaaggtcctctgacgatgatggcttctcattataaacaacactgcccgcctactccggagacgtcttgcgcgacccagataattacttttgaatcttttaaagagaatctgaaagactttctgctggttatcccgtttgattgttgggaaccggttcaagaataa

SEQ ID NO: 959 - DNA, 597 bp, Artificial Sequence
  source: /note="Description of Artificial Sequence: Synthetic polynucleotide"
  source: /note="human TNFa construct with a N terminal PhoA secretion tag"
atgaaacaatcaacgatcgctctggctctgcttccgctgctctttactccagttactaaagcgggtccgcagagggaagaattcccgcgcgatttgagcctgatttcacctcttgctcaggctgtccgctcctcttcgcgtaccccctcggataaacctgtcgcgcacgtggttgcgaacccgcaagcggaagggcagctgcaatggttaaaccgccgggctaatgcactgctggctaatggagttgagttacgcgacaaccaacttgtcgttccttcggaagggctgtatctgatctattcacaggttctctttaaagggcagggttgcccatcaacccacgtgctcctgacacacacgatcagtcgtatcgcggtatcctatcagacgaaagttaacctcctgtcagcgattaaatcgccgtgtcagagagaaactccagagggtgcggaagctaaaccgtggtatgaacctatttatcttggtggagttttccagttggaaaaaggtgatagactgtcggcagagatcaatcgccctgattacctggatttcgctgagtcgggtcaggtttatttcggaattattgcactgtga

SEQ ID NO: 960 - DNA, 480 bp, Artificial Sequence
  source: /note="Description of Artificial Sequence: Synthetic polynucleotide"
  source: /note="human IFNg construct with a N terminal PhoA secretion tag"
atgaagcaatctacgatagcactggcgttgctgccgctgctgttcaccccggttaccaaggcgcaggatccttacgttaaagaagcagagaatctgaaaaaatactttaatgcaggccacagcgatgtggcagataatggcacgttattcctgggcattctgaaaaattggaaagaagaatctgaccggaagatcatgcaatctcagatcgtatcattttatttcaagttgtttaaaaacttcaaggatgaccagtcgattcaaaaatcagtggaaacgatcaaagaagatatgaacgttaagttcttcaactcaaataaaaaaaaacgcgatgatttcgaaaaactgactaattattcggtaactgatttgaatgttcagcgcaaggcgattcatgaattgattcaggttatggcagaactgtcgccagcggcaaaaacgggtaaacgaaaacgttctcagatgttgtttcgtggttga

SEQ ID NO: 961-964 - skipped (4 entries)

SEQ ID NO: 965 - DNA, 2531 bp, Artificial Sequence
  source: /note="Description of Artificial Sequence: Synthetic polynucleotide"
  source: /note="Ptet.phoA-hIL12b-phoA-hIL12a"
ccaggatacatagattaccacaactccgagcccttccaccttaagacccactttcacatttaagttgtttttctaatccgcatatgatcaattcaaggccgaataagaaggctggctctgcaccttggtgatcaaataattcgatagcttgtcgtaataatggcggcatactatcagtagtaggtgtttccctttcttctttagcgacttgatgctcttgatcttccaatacgcaacctaaagtaaaatgccccacagcgctgagtgcatataatgcattctctagtgaaaaaccttgttggcataaaaaggctaattgattttcgagagtttcatactgtttttctgtaggccgtgtacctaaatgtacttttgctccatcgcgatgacttagtaaagcacatctaaaacttttagcgttattacgtaaaaaatcttgccagctttccccttctaaagggcaaaagtgagtatggtgcctatctaacatctcaatggctaaggcgtcgagcaaagcccgcttattttttacatgccaatacaatgtaggctgctctacacctagcttctgggcgagtttacgggttgttaaaccttcgattccgacctcattaagcagctctaatgcgctgttaatcactttacttttatctaatctagacatcattaattcctaatttttgttgacactctatcattgatagagttattttaccactccctatcagtgatagagaaaagtgaaataagtcataaatagggagtccaaaatgaagcagagcacgatcgcattggcgttgctaccgctgttgtttaccccggtcacaaaagccatctgggaactgaaaaaagatgtttatgtagttgaactggattggtacccggatgcacccggtgagatggtggttttgacctgcgacacgccggaagaagatggcataacgtggaccctggatcaaagctctgaagttctgggttcaggtaagacattgacgatccaagtaaaagaatttggcgacgcaggtcagtacacctgccacaaaggtggcgaagttctgtcgcactcactcctgctcctgcacaaaaaagaggatggcatctggagtactgatatcctaaaggatcaaaaagaacctaaaaacaaaacgttcttgcgctgtgaagcgaagaactatagtggtcgctttacgtgctggtggttgactaccatttccaccgatttgaccttttctgttaagagttcgcgcggctcgtcagatccgcagggcgttacttgcggtgcggcgacgctgtcagctgagagagttcgtggggacaacaaagagtacgaatatagtgtagaatgtcaagaggattcggcgtgcccggcagcagaggagtctctccccattgaagttatggtggacgcagtgcataaactgaaatatgagaattacacatcaagcttttttattcgcgatatcatcaaaccggatcctccaaaaaatctgcaactaaagcccctgaaaaattcgcgccaagttgaggtgagctgggaatatccggatacttggtcgacaccgcattcttatttctcactgaccttctgcgttcaggttcaaggtaaatcaaaacgagaaaaaaaggatcgcgtctttaccgacaaaacgtctgctactgtaatctgccgcaagaatgcgtcaatttctgtacgtgcgcaagatcgctactactctagtagttggtctgaatgggcttcagtgccatgctcctgatgagaaaccctacggaggaggttaatttatgaaacagagcacaattgctctggccttgttgccattactgtttacccctgttactaaggctaggaacctgcctgtggcaacaccagaccctgggatgttcccttgcttacatcattcccagaacctgttgcgtgcggtgtctaacatgctgcagaaagccaggcagacgctggaattctacccatgcacttccgaagagatagatcatgaagacattacgaaagacaaaacctcaacggttgaagcatgcttacctctggaattgactaagaatgaatcgtgcttaaactcaagagagaccagtttcatcactaatggctcttgcttagcgtcgcgcaagaccagcttcatgatggcgctctgcctaagtagcatctacgaggacctcaaaatgtaccaagttgaatttaaaactatgaatgccaaacttctaatggacccaaaaagacagatatttttagatcagaatatgcttgcggttattgacgaactcatgcaggcattgaattttaattccgagacggtgccacaaaaaagttctttggaggagccggacttttacaagacaaaaatcaagctgtgcatacttcttcacgcattcagaatacgggccgttacgatcgatcgcgtcatgtcgtatcttaatgcgagctgaaaataaaacgaaaggctcagtcgaaagactgggcctttcgttttatctgttggttccttatcatctggcgaatcggacccacaagagcactg

SEQ ID NO: 966 - DNA, 2549 bp, Artificial Sequence
  source: /note="Description of Artificial Sequence: Synthetic polynucleotide"
  source: /note="Ptet.phoA-mIL12b-phoA-mIL12a"
ccaggatacatagattaccacaactccgagcccttccaccttaagacccactttcacatttaagttgtttttctaatccgcatatgatcaattcaaggccgaataagaaggctggctctgcaccttggtgatcaaataattcgatagcttgtcgtaataatggcggcatactatcagtagtaggtgtttccctttcttctttagcgacttgatgctcttgatcttccaatacgcaacctaaagtaaaatgccccacagcgctgagtgcatataatgcattctctagtgaaaaaccttgttggcataaaaaggctaattgattttcgagagtttcatactgtttttctgtaggccgtgtacctaaatgtacttttgctccatcgcgatgacttagtaaagcacatctaaaacttttagcgttattacgtaaaaaatcttgccagctttccccttctaaagggcaaaagtgagtatggtgcctatctaacatctcaatggctaaggcgtcgagcaaagcccgcttattttttacatgccaatacaatgtaggctgctctacacctagcttctgggcgagtttacgggttgttaaaccttcgattccgacctcattaagcagctctaatgcgctgttaatcactttacttttatctaatctagacatcattaattcctaatttttgttgacactctatcattgatagagttattttaccactccctatcagtgatagagaaaagtgaatgttacacatctaaggagaaacattatgaaacagagcacgatcgcacttgcccttttgccgctgttatttaccccagtgacgaaagccatgtgggaattggaaaaagacgtgtatgttgttgaagttgactggactccggacgcgcctggtgaaactgttaatctgacttgtgatacaccggaggaagatgatataacttggactagcgatcaacgacacggcgtaatcggctctggtaagactttgaccattactgtgaaggaattcttggatgcggggcaatatacgtgtcataaaggcggcgagacgctgtcacactctcacctgttgttacataaaaaagagaatggtatatggtctacggagatcttgaaaaactttaaaaacaaaacttttttgaagtgtgaggctccaaactattctggtcgctttacctgtagttggttggtgcaacgtaacatggatctcaaatttaacataaagtcgtcttcgtcttctcccgatagccgagcggttacctgtggcatggctagtttgtcggcggagaaggtgaccttggatcaacgtgattatgaaaaatatagcgtttcgtgccaagaggacgttacgtgccctaccgctgaagagactttgccgattgaattggcactggaagcacgacaacaaaataaatacgagaattactcaactagtttcttcatccgagatatcataaaaccggaccccccgaagaatctgcaaatgaaaccgcttaaaaattcacaggtagaggtttcgtgggagtacccggatagttggtctacgcctcattcgtattttagcctgaaatttttcgttcgaatacagcgaaaaaaagagaagatgaaagaaactgaagaagggtgtaaccaaaaaggtgcatttctggtggagaaaactagcaccgaggttcaatgcaaaggcggtaacgtgtgcgtacaagctcaagaccgttattataacagtagctgttctaaatgggcttgcgtgccctgccgcgtgagatcatgagaagaagattattgaagaggtccgcatgaaacagagtacgatagccctagccctgttgccgctcctgttcacccccgttactaaagcacgtaaccttccggtggccacgccagatccgggcatgttcccgtgcttacaccattcccagaatctgctgcgcgctgtgagtaatatgctgcagaaggcgagacaaactttggaattttacccgtgcacttcggaggagattgaccatgaggatatcacaaaagacaaaaccagtacagtggaagcctgcctgccccttgaactgactaaaaatgagagttgtttaaattcacgcgaaaccagcttcattactaacggaagctgcttagcatcgcggaaaaccagttttatgatggccctttgcctttcatctatttacgaggaccttaaaatgtatcaagttgaatttaagactatgaacgcgaaactgctaatggatcccaagcgacaaatctttcttgatcaaaatatgttggctgttattgatgaactgatgcaagccctgaattttaactcagaaaccgtacctcagaaatcgagtttagaagaacccgatttctacaaaactaaaatcaagttgtgtatccttttacatgccttccggattcgggccgtcactattgatcgcgtgatgtcgtacttgaatgcctcctaaaaataaaacgaaaggctcagtcgaaagactgggcctttcgttttatctgttggttccttatcatctggcgaatcggacccacaagagcactg

SEQ ID NO: 967 - DNA, 1270 bp, Artificial Sequence
  source: /note="Description of Artificial Sequence: Synthetic polynucleotide"
  source: /note="Ptet.phoA-IL15"
ccaggatacatagattaccacaactccgagcccttccaccttaagacccactttcacatttaagttgtttttctaatccgcatatgatcaattcaaggccgaataagaaggctggctctgcaccttggtgatcaaataattcgatagcttgtcgtaataatggcggcatactatcagtagtaggtgtttccctttcttctttagcgacttgatgctcttgatcttccaatacgcaacctaaagtaaaatgccccacagcgctgagtgcatataatgcattctctagtgaaaaaccttgttggcataaaaaggctaattgattttcgagagtttcatactgtttttctgtaggccgtgtacctaaatgtacttttgctccatcgcgatgacttagtaaagcacatctaaaacttttagcgttattacgtaaaaaatcttgccagctttccccttctaaagggcaaaagtgagtatggtgcctatctaacatctcaatggctaaggcgtcgagcaaagcccgcttattttttacatgccaatacaatgtaggctgctctacacctagcttctgggcgagtttacgggttgttaaaccttcgattccgacctcattaagcagctctaatgcgctgttaatcactttacttttatctaatctagacatcattaattcctaatttttgttgacactctatcattgatagagttattttaccactccctatcagtgatagagaaaagtgaagatcaactcaagataaggaggatccatgaagcaatctacgatcgcactagcgttactgccgttattgtttactcctgtgactaaggctaattgggttaatgttatatctgatttgaaaaaaatagaggatctgattcaatcaatgcacatagatgcgactctgtatactgagagcgatgtgcacccgagttgcaaagttactgctatgaaatgttttctgctggagctgcaagttatctctctggagagtggtgatgcgtctattcacgatactgttgagaatctgattattctggctaataactcgctgtcaagtaatgggaatgttacggaatctggctgtaaggagtgtgaagaattagaagaaaaaaatattaaagagtttctgcagagttttgtgcacattgttcagatgtttatcaatactagctgaaaataaaacgaaaggctcagtcgaaagactgggcctttcgttttatctgttggttccttatcatctggcgaatcggacccacaagagcactg

SEQ ID NO: 968 - DNA, 1309 bp, Artificial Sequence
  source: /note="Description of Artificial Sequence: Synthetic polynucleotide"
  source: /note="Ptet.phoA-GMCSF"
ccaggatacatagattaccacaactccgagcccttccaccttaagacccactttcacatttaagttgtttttctaatccgcatatgatcaattcaaggccgaataagaaggctggctctgcaccttggtgatcaaataattcgatagcttgtcgtaataatggcggcatactatcagtagtaggtgtttccctttcttctttagcgacttgatgctcttgatcttccaatacgcaacctaaagtaaaatgccccacagcgctgagtgcatataatgcattctctagtgaaaaaccttgttggcataaaaaggctaattgattttcgagagtttcatactgtttttctgtaggccgtgtacctaaatgtacttttgctccatcgcgatgacttagtaaagcacatctaaaacttttagcgttattacgtaaaaaatcttgccagctttccccttctaaagggcaaaagtgagtatggtgcctatctaacatctcaatggctaaggcgtcgagcaaagcccgcttattttttacatgccaatacaatgtaggctgctctacacctagcttctgggcgagtttacgggttgttaaaccttcgattccgacctcattaagcagctctaatgcgctgttaatcactttacttttatctaatctagacatcattaattcctaatttttgttgacactctatcattgatagagttattttaccactccctatcagtgatagagaaaagtgaagaaagcaacaacatagggggaaagaatgaagcaatctacgatcgcgttggccttactgcccctgttattcacacccgtgaccaaagcggcaccggcccgcagcccatcaccgtcaactcaaccttgggaacatgtaaatgctattcaagaagctcgccgcctgttgaatttgagtcgcgatactgcagcagagatgaatgagactgtagaggtgatttcagaaatgtttgacctgcaggagccgacttgtttgcaaactcgcctggagctgtacaaacaaggcctgcgtggctcgctgactaaactgaaaggtcctctgacgatgatggcttctcattataaacaacactgcccgcctactccggagacgtcttgcgcgacccagataattacttttgaatcttttaaagagaatctgaaagactttctgctggttatcccgtttgattgttgggaaccggttcaagaataaaaataaaacgaaaggctcagtcgaaagactgggcctttcgttttatctgttggttccttatcatctggcgaatcggacccacaagagcactg

SEQ ID NO: 969 - DNA, 1459 bp, Artificial Sequence
  source: /note="Description of Artificial Sequence: Synthetic polynucleotide"
  source: /note="Ptet-phoA-TNFa"
ccaggatacatagattaccacaactccgagcccttccaccttaagacccactttcacatttaagttgtttttctaatccgcatatgatcaattcaaggccgaataagaaggctggctctgcaccttggtgatcaaataattcgatagcttgtcgtaataatggcggcatactatcagtagtaggtgtttccctttcttctttagcgacttgatgctcttgatcttccaatacgcaacctaaagtaaaatgccccacagcgctgagtgcatataatgcattctctagtgaaaaaccttgttggcataaaaaggctaattgattttcgagagtttcatactgtttttctgtaggccgtgtacctaaatgtacttttgctccatcgcgatgacttagtaaagcacatctaaaacttttagcgttattacgtaaaaaatcttgccagctttccccttctaaagggcaaaagtgagtatggtgcctatctaacatctcaatggctaaggcgtcgagcaaagcccgcttattttttacatgccaatacaatgtaggctgctctacacctagcttctgggcgagtttacgggttgttaaaccttcgattccgacctcattaagcagctctaatgcgctgttaatcactttacttttatctaatctagacatcattaattcctaatttttgttgacactctatcattgatagagttattttaccactccctatcagtgatagagaaaagtgaacacaacacagaaaggagggctgtccatgaaacaatcaacgatcgctctggctctgcttccgctgctctttactccagttactaaagcgggtccgcagagggaagaattcccgcgcgatttgagcctgatttcacctcttgctcaggctgtccgctcctcttcgcgtaccccctcggataaacctgtcgcgcacgtggttgcgaacccgcaagcggaagggcagctgcaatggttaaaccgccgggctaatgcactgctggctaatggagttgagttacgcgacaaccaacttgtcgttccttcggaagggctgtatctgatctattcacaggttctctttaaagggcagggttgcccatcaacccacgtgctcctgacacacacgatcagtcgtatcgcggtatcctatcagacgaaagttaacctcctgtcagcgattaaatcgccgtgtcagagagaaactccagagggtgcggaagctaaaccgtggtatgaacctatttatcttggtggagttttccagttggaaaaaggtgatagactgtcggcagagatcaatcgccctgattacctggatttcgctgagtcgggtcaggtttatttcggaattattgcactgtgaaaataaaacgaaaggctcagtcgaaagactgggcctttcgttttatctgttggttccttatcatctggcgaatcggacccacaagagcactg

SEQ ID NO: 970 - DNA, 1342 bp, Artificial Sequence
  source: /note="Description of Artificial Sequence: Synthetic polynucleotide"
  source: /note="Ptet-phoA-IFNg"
ccaggatacatagattaccacaactccgagcccttccaccttaagacccactttcacatttaagttgtttttctaatccgcatatgatcaattcaaggccgaataagaaggctggctctgcaccttggtgatcaaataattcgatagcttgtcgtaataatggcggcatactatcagtagtaggtgtttccctttcttctttagcgacttgatgctcttgatcttccaatacgcaacctaaagtaaaatgccccacagcgctgagtgcatataatgcattctctagtgaaaaaccttgttggcataaaaaggctaattgattttcgagagtttcatactgtttttctgtaggccgtgtacctaaatgtacttttgctccatcgcgatgacttagtaaagcacatctaaaacttttagcgttattacgtaaaaaatcttgccagctttccccttctaaagggcaaaagtgagtatggtgcctatctaacatctcaatggctaaggcgtcgagcaaagcccgcttattttttacatgccaatacaatgtaggctgctctacacctagcttctgggcgagtttacgggttgttaaaccttcgattccgacctcattaagcagctctaatgcgctgttaatcactttacttttatctaatctagacatcattaattcctaatttttgttgacactctatcattgatagagttattttaccactccctatcagtgatagagaaaagtgaacaccaccaccacgaggaggtaaaaaatgaagcaatctacgatagcactggcgttgctgccgctgctgttcaccccggttaccaaggcgcaggatccttacgttaaagaagcagagaatctgaaaaaatactttaatgcaggccacagcgatgtggcagataatggcacgttattcctgggcattctgaaaaattggaaagaagaatctgaccggaagatcatgcaatctcagatcgtatcattttatttcaagttgtttaaaaacttcaaggatgaccagtcgattcaaaaatcagtggaaacgatcaaagaagatatgaacgttaagttcttcaactcaaataaaaaaaaacgcgatgatttcgaaaaactgactaattattcggtaactgatttgaatgttcagcgcaaggcgattcatgaattgattcaggttatggcagaactgtcgccagcggcaaaaacgggtaaacgaaaacgttctcagatgttgtttcgtggttgaaaataaaacgaaaggctcagtcgaaagactgggcctttcgttttatctgttggttccttatcatctggcgaatcggacccacaagagcactg

SEQ ID NO: 971-974 - skipped (4 entries)

SEQ ID NO: 975 - DNA, 5100 bp, Artificial Sequence
  source: /note="Description of Artificial Sequence: Synthetic polynucleotide"
  source: /note="ptet-J43scFv-V5-HIS ("
agcgcccaatacgcaaaccgcctctccccgcgcgttggccgattcattaatgcagctggcacgacaggtttcccgactggaaagcgggcagtgagcgcaacgcaattaatgtgagttagctcactcattaggcaccccaggctttacactttatgcttccggctcgtatgttgtgtggaattgtgagcggataacaatttcacacaggaaacagctatgaccatgattacgccaagctatttaggtgacactatagaatactcaagctatgcatcaagcttggtaccgagctcggatccactagtaacggccgccagtgtgctggaattcgcccttttaagacccactttcacatttaagttgtttttctaatccgcagatgatcaattcaaggccgaataagaaggctggctctgcaccttggtgatcaaataattcgatagcttgtcgtaataatggcggcatactatcagtagtaggtgtttccctttcttctttagcgacttgatgctcttgatcttccaatacgcaacctaaagtaaaatgccccacagcgctgagtgcatataatgcattctctagtgaaaaaccttgttggcataaaaaggctaattgattttcgagagtttcatactgtttttctgtaggccgtgtacctaaatgtacttttgctccatcgcgatgacttagtaaagcacatctaaaacttttagcgttattacgtaaaaaatcttgccagctttccccttctaaagggcaaaagtgagtatggtgcctatctaacatctcaatggctaaggcgtcgagcaaagcccgcttattttttacatgccaatacaatgtaggctgctctacacctagcttctgggcgagtttacgggttgttaaaccttcgattccgacctcattaagcagctctaatgcgctgttaatcactttacttttatctaatctagacatcattaattcctaatttttgttgacactctatcattgatagagttattttaccactccctatcagtgatagagaaaagtgaaaggaggtaaattatgcaattggaagttcgcctgttggagagcggtggtggacttgtgaaacccgagggaagccttaaactttcgtgcgttgctagtgggttcacattttcagactatttcatgtcctgggtccgtcaagccccgggaaaaggacttgaatgggttgcccatatttacaccaagagctataactatgccacatactattctggaagcgttaaaggtcgttttaccatttcgcgtgacgacagccgttctatggtgtatttgcagatgaataaccttcgtacagaagatacggctacttactactgtactcgcgatggatcaggctatcccagtttagatttctggggacagggtactcaggttactgtttcaagcggtggaggcggctctggcggtggtgggagtggaggcggtggcagttacgagctgacgcagccaccctcggcaagtgtaaacgtgggcgaaacggtgaaaattacttgttcgggggatcaactgcccaaatacttcgccgattggtttcatcaacgttccgatcagactattttacaagtgatttatgatgataacaaacgtccgtcaggaatcccagagcgtatcagcggatcgagcagcggaacaacagcaactttgaccatccgcgatgtccgtgccgaagacgagggggactactattgtttctctggatacgtggactcagacagcaagctgtatgtttttggctcaggaacacaactgaccgtactgggcaagggcgagctcaattcgaagcttgaaggtaagcctatccctaaccctctcctcggcctcgattctacgcgtaccggtcatcatcaccatcaccattgagcatgcggtctcaggaggaagggcgaattctgcagatatccatcacactggcggccgctcgagcatgcatctagagggcccaattcgccctatagtgagtcgtattacaattcactggccgtcgttttacaacgtcgtgactgggaaaaccctggcgttacccaacttaatcgccttgcagcacatccccctttcgccagctggcgtaatagcgaagaggcccgcaccgatcgcccttcccaacagttgcgcagcctatacgtacggcagtttaaggtttacacctataaaagagagagccgttatcgtctgtttgtggatgtacagagtgatattattgacacgccggggcgacggatggtgatccccctggccagtgcacgtctgctgtcagataaagtctcccgtgaactttacccggtggtgcatatcggggatgaaagctggcgcatgatgaccaccgatatggccagtgtgccggtctccgttatcggggaagaagtggctgatctcagccaccgcgaaaatgacatcaaaaacgccattaacctgatgttctggggaatataaatgtcaggcatgagattatcaaaaaggatcttcacctagatccttttcacgtagaaagccagtccgcagaaacggtgctgaccccggatgaatgtcagctactgggctatctggacaagggaaaacgcaagcgcaaagagaaagcaggtagcttgcagtgggcttacatggcgatagctagactgggcggttttatggacagcaagcgaaccggaattgccagctggggcgccctctggtaaggttgggaagccctgcaaagtaaactggatggctttctcgccgccaaggatctgatggcgcaggggatcaagctctgatcaagagacaggatgaggatcgtttcgcatgattgaacaagatggattgcacgcaggttctccggccgcttgggtggagaggctattcggctatgactgggcacaacagacaatcggctgctctgatgccgccgtgttccggctgtcagcgcaggggcgcccggttctttttgtcaagaccgacctgtccggtgccctgaatgaactgcaagacgaggcagcgcggctatcgtggctggccacgacgggcgttccttgcgcagctgtgctcgacgttgtcactgaagcgggaagggactggctgctattgggcgaagtgccggggcaggatctcctgtcatctcaccttgctcctgccgagaaagtatccatcatggctgatgcaatgcggcggctgcatacgcttgatccggctacctgcccattcgaccaccaagcgaaacatcgcatcgagcgagcacgtactcggatggaagccggtcttgtcgatcaggatgatctggacgaagagcatcaggggctcgcgccagccgaactgttcgccaggctcaaggcgagcatgcccgacggcgaggatctcgtcgtgacccatggcgatgcctgcttgccgaatatcatggtggaaaatggccgcttttctggattcatcgactgtggccggctgggtgtggcggaccgctatcaggacatagcgttggctacccgtgatattgctgaagagcttggcggcgaatgggctgaccgcttcctcgtgctttacggtatcgccgctcccgattcgcagcgcatcgccttctatcgccttcttgacgagttcttctgaattattaacgcttacaatttcctgatgcggtattttctccttacgcatctgtgcggtatttcacaccgcatacaggtggcacttttcggggaaatgtgcgcggaacccctatttgtttatttttctaaatacattcaaatatgtatccgctcatgagacaataaccctgataaatgcttcaataatagcacgtgaggagggccaccatggccaagttgaccagtgccgttccggtgctcaccgcgcgcgacgtcgccggagcggtcgagttctggaccgaccggctcgggttctcccgggacttcgtggaggacgacttcgccggtgtggtccgggacgacgtgaccctgttcatcagcgcggtccaggaccaggtggtgccggacaacaccctggcctgggtgtgggtgcgcggcctggacgagctgtacgccgagtggtcggaggtcgtgtccacgaacttccgggacgcctccgggccggccatgaccgagatcggcgagcagccgtgggggcgggagttcgccctgcgcgacccggccggcaactgcgtgcacttcgtggccgaggagcaggactgacacgtgctaaaacttcatttttaatttaaaaggatctaggtgaagatcctttttgataatctcatgaccaaaatcccttaacgtgagttttcgttccactgagcgtcagaccccgtagaaaagatcaaaggatcttcttgagatcctttttttctgcgcgtaatctgctgcttgcaaacaaaaaaaccaccgctaccagcggtggtttgtttgccggatcaagagctaccaactctttttccgaaggtaactggcttcagcagagcgcagataccaaatactgtccttctagtgtagccgtagttaggccaccacttcaagaactctgtagcaccgcctacatacctcgctctgctaatcctgttaccagtggctgctgccagtggcgataagtcgtgtcttaccgggttggactcaagacgatagttaccggataaggcgcagcggtcgggctgaacggggggttcgtgcacacagcccagcttggagcgaacgacctacaccgaactgagatacctacagcgtgagctatgagaaagcgccacgcttcccgaagggagaaaggcggacaggtatccggtaagcggcagggtcggaacaggagagcgcacgagggagcttccagggggaaacgcctggtatctttatagtcctgtcgggtttcgccacctctgacttgagcgtcgatttttgtgatgctcgtcaggggggcggagcctatggaaaaacgccagcaacgcggcctttttacggttcctgggcttttgctggccttttgctcacatgttctttcctgcgttatcccctgattctgtggataaccgtattaccgcctttgagtgagctgataccgctcgccgcagccgaacgaccgagcgcagcgagtcagtgagcgaggaagcggaag

SEQ ID NO: 976 - DNA, 846 bp, Artificial Sequence
  source: /note="Description of Artificial Sequence: Synthetic polynucleotide"
  source: /note="J43-Anti-PD1-scFv-V5-HIS"
atgcaattggaagttcgcctgttggagagcggtggtggacttgtgaaacccgagggaagccttaaactttcgtgcgttgctagtgggttcacattttcagactatttcatgtcctgggtccgtcaagccccgggaaaaggacttgaatgggttgcccatatttacaccaagagctataactatgccacatactattctggaagcgttaaaggtcgttttaccatttcgcgtgacgacagccgttctatggtgtatttgcagatgaataaccttcgtacagaagatacggctacttactactgtactcgcgatggatcaggctatcccagtttagatttctggggacagggtactcaggttactgtttcaagcggtggaggcggctctggcggtggtgggagtggaggcggtggcagttacgagctgacgcagccaccctcggcaagtgtaaacgtgggcgaaacggtgaaaattacttgttcgggggatcaactgcccaaatacttcgccgattggtttcatcaacgttccgatcagactattttacaagtgatttatgatgataacaaacgtccgtcaggaatcccagagcgtatcagcggatcgagcagcggaacaacagcaactttgaccatccgcgatgtccgtgccgaagacgagggggactactattgtttctctggatacgtggactcagacagcaagctgtatgtttttggctcaggaacacaactgaccgtactgggcaagggcgagctcaattcgaagcttgaaggtaagcctatccctaaccctctcctcggcctcgattctacgcgtaccggtcatcatcaccatcaccattga

SEQ ID NO: 977 - DNA, 363 bp, Artificial Sequence
  source: /note="Description of Artificial Sequence: Synthetic polynucleotide"
  source: /note="scFvHeavy chain"
gaagttcgcctgttggagagcggtggtggacttgtgaaacccgagggaagccttaaactttcgtgcgttgctagtgggttcacattttcagactatttcatgtcctgggtccgtcaagccccgggaaaaggacttgaatgggttgcccatatttacaccaagagctataactatgccacatactattctggaagcgttaaaggtcgttttaccatttcgcgtgacgacagccgttctatggtgtatttgcagatgaataaccttcgtacagaagatacggctacttactactgtactcgcgatggatcaggctatcccagtttagatttctggggacagggtactcaggttactgtttcaagc

SEQ ID NO: 978 - DNA, 330 bp, Artificial Sequence
  source: /note="Description of Artificial Sequence: Synthetic polynucleotide"
  source: /note="scFvLight chain"
tacgagctgacgcagccaccctcggcaagtgtaaacgtgggcgaaacggtgaaaattacttgttcgggggatcaactgcccaaatacttcgccgattggtttcatcaacgttccgatcagactattttacaagtgatttatgatgataacaaacgtccgtcaggaatcccagagcgtatcagcggatcgagcagcggaacaacagcaactttgaccatccgcgatgtccgtgccgaagacgagggggactactattgtttctctggatacgtggactcagacagcaagctgtatgtttttggctcaggaacacaactgaccgtactgggc

SEQ ID NO: 979 - DNA, 45 bp, Artificial Sequence
  source: /note="Description of Artificial Sequence: Synthetic oligonucleotide"
  source: /note="scFvLinker"
ggtggaggcggctctggcggtggtgggagtggaggcggtggcagt

SEQ ID NO: 980 - protein, 281 aa, Artificial Sequence
  source: /note="Description of Artificial Sequence: Synthetic polypeptide"
  source: /note="J43-Anti-PD1-scFV polypeptide sequence"
MQLEVRLLESGGGLVKPEGSLKLSCVASGFTFSDYFMSWVRQAPGKGLEWVAHIYTKSYNYATYYSGSVKGRFTISRDDSRSMVYLQMNNLRTEDTATYYCTRDGSGYPSLDFWGQGTQVTVSSGGGGSGGGGSGGGGSYELTQPPSASVNVGETVKITCSGDQLPKYFADWFHQRSDQTILQVIYDDNKRPSGIPERISGSSSGTTATLTIRDVRAEDEGDYYCFSGYVDSDSKLYVFGSGTQLTVLGKGELNSKLEGKPIPNPLLGLDSTRTGHHHHHH

SEQ ID NO: 981 - DNA, 1668 bp, Artificial Sequence
  source: /note="Description of Artificial Sequence: Synthetic polynucleotide"
  source: /note="Ptet-phoA-FLAG-J43-scFv-V5-HIS"
ttaagacccactttcacatttaagttgtttttctaatccgcagatgatcaattcaaggccgaataagaaggctggctctgcaccttggtgatcaaataattcgatagcttgtcgtaataatggcggcatactatcagtagtaggtgtttccctttcttctttagcgacttgatgctcttgatcttccaatacgcaacctaaagtaaaatgccccacagcgctgagtgcatataatgcattctctagtgaaaaaccttgttggcataaaaaggctaattgattttcgagagtttcatactgtttttctgtaggccgtgtacctaaatgtacttttgctccatcgcgatgacttagtaaagcacatctaaaacttttagcgttattacgtaaaaaatcttgccagctttccccttctaaagggcaaaagtgagtatggtgcctatctaacatctcaatggctaaggcgtcgagcaaagcccgcttattttttacatgccaatacaatgtaggctgctctacacctagcttctgggcgagtttacgggttgttaaaccttcgattccgacctcattaagcagctctaatgcgctgttaatcactttacttttatctaatctagacataattaattcctaatttttgttgacactctatcattgatagagttattttaccactccctatcagtgatagagaaaagtgaaaggaggtaaattatgactagtaaacaatcgaccatcgcattggcgctgcttcctctattgttcacaccggtgacaaaggcagtcgactataaggatgacgacgacaagcaattgggcggtggcatggaagttcgcctgttggagagcggtggaggacttgtgaagcccgagggaagccttaaactttcgtgcgttgctagtgggttcacattttcagactatttcatgtcctgggtccgtcaagccccgggaaaaggacttgaatgggttgcccatatttacaccaagagctataactatgccacatactattctggaagcgttaaaggtcgttttaccatttcgcgtgacgacagccgttctatggtgtatttgcagatgaataaccttcgtacagaagatacggctacttactactgtactcgcgatggatcaggctatcccagtttagatttctggggacagggtactcaggttactgtttcaagcggtggaggcggctctggcggtggtgggagtggaggcggtggcagttacgagctgacgcagccgccctcggcaagtgtaaacgtgggcgaaacggtgaaaattacttgttcgggggatcaactgcccaaatacttcgccgattggtttcatcaacgttccgatcagactattttacaagtgatttatgatgataacaaacgtccgtcaggaatcccagagcgtatcagcggatcgagcagcggaacaacagcaactttgaccatccgcgatgtccgtgccgaagacgagggggactactattgtttctctggatacgtggactcagacagcaagctgtatgtttttggctcaggaacacaactgaccgtactgggcaagggcgagctcaattcgaagcttgaaggtaagcctatccctaaccctctcctcggactcgattctacgggatccggtcatcatcaccatcaccattga

SEQ ID NO: 982 - protein, 313 aa, Artificial Sequence
  source: /note="Description of Artificial Sequence: Synthetic polypeptide"
  source: /note="phoA-FLAG-J43-scFv-V5-HIS"
KQSTIALALLPLLFTPVTKAVDYKDDDDKQLGGGMEVRLLESGGGLVKPEGSLKLSCVASGFTFSDYFMSWVRQAPGKGLEWVAHIYTKSYNYATYYSGSVKGRFTISRDDSRSMVYLQMNNLRTEDTATYYCTRDGSGYPSLDFWGQGTQVTVSSGGGGSGGGGSGGGGSYELTQPPSASVNVGETVKITCSGDQLPKYFADWFHQRSDQTILQVIYDDNKRPSGIPERISGSSSGTTATLTIRDVRAEDEGDYYCFSGYVDSDSKLYVFGSGTQLTVLGKGELNSKLEGKPIPNPLLGLDSTGSGHHHHHH

SEQ ID NO: 983 - DNA, 1674 bp, Artificial Sequence
  source: /note="Description of Artificial Sequence: Synthetic polynucleotide"
  source: /note="Ptet-ompF-FLAG-J43-scFv-V5-HIS"
ttaagacccactttcacatttaagttgtttttctaatccgcagatgatcaattcaaggccgaataagaaggctggctctgcaccttggtgatcaaataattcgatagcttgtcgtaataatggcggcatactatcagtagtaggtgtttccctttcttctttagcgacttgatgctcttgatcttccaatacgcaacctaaagtaaaatgccccacagcgctgagtgcatataatgcattctctagtgaaaaaccttgttggcataaaaaggctaattgattttcgagagtttcatactgtttttctgtaggccgtgtacctaaatgtacttttgctccatcgcgatgacttagtaaagcacatctaaaacttttagcgttattacgtaaaaaatcttgccagctttccccttctaaagggcaaaagtgagtatggtgcctatctaacatctcaatggctaaggcgtcgagcaaagcccgcttattttttacatgccaatacaatgtaggctgctctacacctagcttctgggcgagtttacgggttgttaaaccttcgattccgacctcattaagcagctctaatgcgctgttaatcactttacttttatctaatctagacatcattaattcctaatttttgttgacactctatcattgatagagttattttaccactccctatcagtgatagagaaaagtgaaaggaggtaaattatgactagtatgatgaagcgtaacatcttagccgttattgtccccgcattgcttgtggccgggacggctaacgcagtcgactataaggatgacgacgacaagcaattgggcggtggcatggaagttcgcctgttggagagcggtggaggacttgtgaagcccgagggaagccttaaactttcgtgcgttgctagtgggttcacattttcagactatttcatgtcctgggtccgtcaagccccgggaaaaggacttgaatgggttgcccatatttacaccaagagctataactatgccacatactattctggaagcgttaaaggtcgttttaccatttcgcgtgacgacagccgttctatggtgtatttgcagatgaataaccttcgtacagaagatacggctacttactactgtactcgcgatggatcaggctatcccagtttagatttctggggacagggtactcaggttactgtttcaagcggtggaggcggctctggcggtggtgggagtggaggcggtggcagttacgagctgacgcagccgccctcggcaagtgtaaacgtgggcgaaacggtgaaaattacttgttcgggggatcaactgcccaaatacttcgccgattggtttcatcaacgttccgatcagactattttacaagtgatttatgatgataacaaacgtccgtcaggaatcccagagcgtatcagcggatcgagcagcggaacaacagcaactttgaccatccgcgatgtccgtgccgaagacgagggggactactattgtttctctggatacgtggactcagacagcaagctgtatgtttttggctcaggaacacaactgaccgtactgggcaagggcgagctcaattcgaagcttgaaggtaagcctatccctaaccctctcctcggactcgattctacgggatccggtcatcatcaccatcaccattga

SEQ ID NO: 984 - protein, 315 aa, Artificial Sequence
  source: /note="Description of Artificial Sequence: Synthetic polypeptide"
  source: /note="ompF-FLAG-J43-scFv-V5-HIS"
MMKRNILAVIVPALLVAGTANAVDYKDDDDKQLGGGMEVRLLESGGGLVKPEGSLKLSCVASGFTFSDYFMSWVRQAPGKGLEWVAHIYTKSYNYATYYSGSVKGRFTISRDDSRSMVYLQMNNLRTEDTATYYCTRDGSGYPSLDFWGQGTQVTVSSGGGGSGGGGSGGGGSYELTQPPSASVNVGETVKITCSGDQLPKYFADWFHQRSDQTILQVIYDDNKRPSGIPERISGSSSGTTATLTIRDVRAEDEGDYYCFSGYVDSDSKLYVFGSGTQLTVLGKGELNSKLEGKPIPNPLLGLDSTGSGHHHHHH

SEQ ID NO: 985 - DNA, 1668 bp, Artificial Sequence
  source: /note="Description of Artificial Sequence: Synthetic polynucleotide"
  source: /note="Ptet-PelB-FLAG-J43-scFv-V5-HIS"
ttaagacccactttcacatttaagttgtttttctaatccgcagatgatcaattcaaggccgaataagaaggctggctctgcaccttggtgatcaaataattcgatagcttgtcgtaataatggcggcatactatcagtagtaggtgtttccctttcttctttagcgacttgatgctcttgatcttccaatacgcaacctaaagtaaaatgccccacagcgctgagtgcatataatgcattctctagtgaaaaaccttgttggcataaaaaggctaattgattttcgagagtttcatactgtttttctgtaggccgtgtacctaaatgtacttttgctccatcgcgatgacttagtaaagcacatctaaaacttttagcgttattacgtaaaaaatcttgccagctttccccttctaaagggcaaaagtgagtatggtgcctatctaacatctcaatggctaaggcgtcgagcaaagcccgcttattttttacatgccaatacaatgtaggctgctctacacctagcttctgggcgagtttacgggttgttaaaccttcgattccgacctcattaagcagctctaatgcgctgttaatcactttacttttatctaatctagacatcattaattcctaatttttgttgacactctatcattgatagagttattttaccactccctatcagtgatagagaaaagtgaaaggaggtaaattatgactagtaaatatcttcttccaacggctgctgctggtttattgcttcttgccgcccagcctgcgatggctgtcgactataaggatgacgacgacaagcaattgggcggtggcatggaagttcgcctgttggagagcggtggaggacttgtgaagcccgagggaagccttaaactttcgtgcgttgctagtgggttcacattttcagactatttcatgtcctgggtccgtcaagccccgggaaaaggacttgaatgggttgcccatatttacaccaagagctataactatgccacatactattctggaagcgttaaaggtcgttttaccatttcgcgtgacgacagccgttctatggtgtatttgcagatgaataaccttcgtacagaagatacggctacttactactgtactcgcgatggatcaggctatcccagtttagatttctggggacagggtactcaggttactgtttcaagcggtggaggcggctctggcggtggtgggagtggaggcggtggcagttacgagctgacgcagccgccctcggcaagtgtaaacgtgggcgaaacggtgaaaattacttgttcgggggatcaactgcccaaatacttcgccgattggtttcatcaacgttccgatcagactattttacaagtgatttatgatgataacaaacgtccgtcaggaatcccagagcgtatcagcggatcgagcagcggaacaacagcaactttgaccatccgcgatgtccgtgccgaagacgagggggactactattgtttctctggatacgtggactcagacagcaagctgtatgtttttggctcaggaacacaactgaccgtactgggcaagggcgagctcaattcgaagcttgaaggtaagcctatccctaaccctctcctcggactcgattctacgggatccggtcatcatcaccatcaccat

SEQ ID NO: 986 - protein, 314 aa, Artificial Sequence
  source: /note="Description of Artificial Sequence: Synthetic polypeptide"
  source: /note="PelB-FLAG-J43-scFv-V5-HIS"
KYLLPTAAAGLLLLAAQPAMAVDYKDDDDKQLGGGMEVRLLESGGGLVKPEGSLKLSCVASGFTFSDYFMSWVRQAPGKGLEWVAHIYTKSYNYATYYSGSVKGRFTISRDDSRSMVYLQMNNLRTEDTATYYCTRDGSGYPSLDFWGQGTQVTVSSGGGGSGGGGSGGGGSYELTQPPSASVNVGETVKITCSGDQLPKYFADWFHQRSDQTILQVIYDDNKRPSGIPERISGSSSGTTATLTIRDVRAEDEGDYYCFSGYVDSDSKLYVFGSGTQLTVLGKGELNSKLEGKPIPNPLLGLDSTGSGHHHHHH

SEQ ID NO: 987 - DNA, 5708 bp, Artificial Sequence
  source: /note="Description of Artificial Sequence: Synthetic polynucleotide"
  source: /note="p15A-Kan-ptet-Invasin-FLAG-J43scFv-V5-HIS"
tagcggagtgtatactggcttactatgttggcactgatgagggtgtcagtgaagtgcttcatgtggcaggagaaaaaaggctgcaccggtgcgtcagcagaatatgtgatacaggatatattccgcttcctcgctcactgactcgctacgctcggtcgttcgactgcggcgagcggaaatggcttacgaacggggcggagatttcctggaagatgccaggaagatacttaacagggaagtgagagggccgcggcaaagccgtttttccataggctccgcccccctgacaagcatcacgaaatctgacgctcaaatcagtggtggcgaaacccgacaggactataaagataccaggcgtttcccctggcggctccctcgtgcgctctcctgttcctgcctttcggtttaccggtgtcattccgctgttatggccgcgtttgtctcattccacgcctgacactcagttccgggtaggcagttcgctccaagctggactgtatgcacgaaccccccgttcagtccgaccgctgcgccttatccggtaactatcgtcttgagtccaacccggaaagacatgcaaaagcaccactggcagcagccactggtaattgatttagaggagttagtcttgaagtcatgcgccggttaaggctaaactgaaaggacaagttttggtgactgcgctcctccaagccagttacctcggttcaaagagttggtagctcagagaaccttcgaaaaaccgccctgcaaggcggttttttcgttttcagagcaagagattacgcgcagaccaaaacgatctcaagaagatcatcttattaaggggtctgacgctcagtggaacggtgcaccctgcagggctagctgataaagcgttcgcgctgcattcggcagtttaagacccactttcacatttaagttgtttttctaatccgcatatgatcaattcaaggccgaataagaaggctggctctgcaccttggtgatcaaataattcgatagcttgtcgtaataatggcggcatactatcagtagtaggtgtttccctttcttctttagcgacttgatgctcttgatcttccaatacgcaacctaaagtaaaatgccccacagcgctgagtgcatataatgcattctctagtgaaaaaccttgttggcataaaaaggctaattgattttcgagagtttcatactgtttttctgtaggccgtgtacctaaatgtacttttgctccatcgcgatgacttagtaaagcacatctaaaacttttagcgttattacgtaaaaaatcttgccagctttccccttctaaagggcaaaagtgagtatggtgcctatctaacatctcaatggctaaggcgtcgagcaaagcccgcttattttttacatgccaatacaatgtaggctgctctacacctagcttctgggcgagtttacgggttgttaaaccttcgattccgacctcattaagcagctctaatgcgctgttaatcactttacttttatctaatctagacatcattaattcctaatttttgttgacactctatcattgatagagttattttaccactccctatcagtgatagagaaaagtgaaaggaggtaaattatgactagtatggttttccaacccatcagcgaatttttgctgattcgtaacgctgggatgtccatgtattttaacaagatcatttcttttaacatcatttcacgtatcgttatttgcatttttcttatctgtggtatgttcatggccggtgcatctgaaaagtatgatgcaaacgcaccccaacaggtgcagccatactcggtttcatcatcagcgttcgagaatctgcaccccaataacgagatggagtcgagtatcaacccttttagtgcttcggacaccgagcgtaatgcagctatcatcgatcgtgctaacaaggaacaagaaacggaagcagtcaacaaaatgatctccactggcgctcgtttagctgccagcggtcgcgcgtccgatgtggcgcacagtatggtaggggatgcggtcaaccaggagattaaacaatggctgaatcgcttcggcactgctcaagtgaatttaaattttgacaagaacttctcgttaaaggagtcttcgcttgactggttggccccatggtacgattcggcgtcattccttttcttttctcagttgggcatccgtaacaaggacagtcgtaatacacttaaccttggtgttggcattcgcacattagaaaatggttggttgtatggcctgaacaccttttacgacaatgacttaacgggacacaatcaccgtatcgggctgggcgccgaggcgtggactgactacttgcagttagccgcgaatgggtacttccgtcttaatggttggcactcttcccgtgacttcagcgactacaaagaacgccctgctaccgggggagatttgcgtgcgaatgcgtacctgcccgctcttccgcaacttggcgggaagttaatgtatgagcagtatactggggaacgcgtggctctgttcggaaaggacaacctgcagcgcaacccatacgctgtcactgcgggtatcaactatacgccagttccgttgctgacggtcggcgtggatcaacgtatggggaagtcgagtaaacatgaaacgcaatggaatttacaaatgaactatcgcttaggggagagtttccaaagtcagcttagcccttcggcggtcgcagggactcgtttgcttgctgagtcccgctacaacctggttgatcgcaataacaatatcgtactggaataccagaaacaacaagtggttaagctgacgttgagccctgcgaccatcagtggattgcccggacaagtttaccaggtaaatgcccaggtccagggggcctctgcggttcgcgaaattgtctggtcagacgcagaattaatcgctgcaggaggcaccttaacgccactttccactacacaattcaatttagtccttcccccatacaaacgtaccgcccaggtatcgcgcgtaactgatgacttaactgctaatttttattcactgtcggcgttagcagttgaccatcaaggcaaccgtagtaattccttcacattatctgtaacggtgcagcagccgcaactgacgcttaccgcagcggtcattggtgatggggccccagctaatgggaaaaccgcaatcactgtcgagttcacagttgcagattttgaaggcaagccgctggcgggtcaggaggttgtgattacgactaataacggtgctcttcctaataagattactgaaaagactgacgctaacggcgttgcccgcattgcccttacgaacacaaccgatggggtcacggtagttaccgcagaggtcgaggggcaacgccaatccgttgacacgcacttcgttaagggtactatcgcggccgataaaagcacgctggccgcggtcgactataaggatgacgacgacaagcaattggaagttcgcctgttggagagcggtggtggacttgtgaaacccgagggaagccttaaactttcgtgcgttgctagtgggttcacattttcagactatttcatgtcctgggtccgtcaagccccgggaaaaggacttgaatgggttgcccatatttacaccaagagctataactatgccacatactattctggaagcgttaaaggtcgttttaccatttcgcgtgacgacagccgttctatggtgtatttgcagatgaataaccttcgtacagaagatacggctacttactactgtactcgcgatggatcaggctatcccagtttagatttctggggacagggtactcaggttactgtttcaagcggtggaggcggctctggcggtggtgggagtggaggcggtggcagttacgagctgacgcagccaccctcggcaagtgtaaacgtgggcgaaacggtgaaaattacttgttcgggggatcaactgcccaaatacttcgccgattggtttcatcaacgttccgatcagactattttacaagtgatttatgatgataacaaacgtccgtcaggaatcccagagcgtatcagcggatcgagcagcggaacaacagcaactttgaccatccgcgatgtccgtgccgaagacgagggggactactattgtttctctggatacgtggactcagacagcaagctgtatgtttttggctcaggaacacaactgaccgtactgggcaagggcgagctcaattcgaagcttgaaggtaagcctatccctaaccctctcctcggcctcgattctacgcgtaccggtcatcatcaccatcaccattgagcatgctaatcagccgtggaattcgcaacgtaaaaaaacccgccccggcgggtttttttataccggtctcaggaggaacgattggtaaacccggtgaacgcatgagaaagcccccggaagatcaccttccgggggcttttttattgcgcggaccaaaacgaaaaaagacgctcgaaagcgtctcttttctggaatttggtaccgaggcgtaatgctctgccagtgttacaaccaattaaccaattctgattagaaaaactcatcgagcatcaaatgaaactgcaatttattcatatcaggattatcaataccatatttttgaaaaagccgtttctgtaatgaaggagaaaactcaccgaggcagttccataggatggcaagatcctggtatcggtctgcgattccgactcgtccaacatcaatacaacctattaatttcccctcgtcaaaaataaggttatcaagtgagaaatcaccatgagtgacgactgaatccggtgagaatggcaaaagcttatgcatttctttccagacttgttcaacaggccagccattacgctcgtcatcaaaatcactcgcatcaaccaaaccgttattcattcgtgattgcgcctgagcgagacgaaatacgcgatcgctgttaaaaggacaattacaaacaggaatcgaatgcaaccggcgcaggaacactgccagcgcatcaacaatattttcacctgaatcaggatattcttctaatacctggaatgctgttttcccggggatcgcagtggtgagtaaccatgcatcatcaggagtacggataaaatgcttgatggtcggaagaggcataaattccgtcagccagtttagtctgaccatctcatctgtaacatcattggcaacgctacctttgccatgtttcagaaacaactctggcgcatcgggcttcccatacaatcgatagattgtcgcacctgattgcccgacattatcgcgagcccatttatacccatataaatcagcatccatgttggaatttaatcgcggcctcgagcaagacgtttcccgttgaatatggctcataacaccccttgtattactgtttatgtaagcagacagttttattgttcatgatgatatatttttatcttgtgcaatgtaacatcagagattttgagacacaacgtggctttgttgaataaatcgaacttttgctgagttgaaggatcagatcacgcatcttcccgacaacgcagaccgttccgtggcaaagcaaaagttcaaaatcaccaactggtccacctacaacaaagctctcatcaaccgtggctccctcactttctggctggatgatggggcgattcaggcctggtatgagtcagcaacaccttcttcacgaggcagacctcagcgc

SEQ ID NO: 988 - DNA, 4282 bp, Artificial Sequence
  source: /note="Description of Artificial Sequence: Synthetic polynucleotide"
  source: /note="p15A-Kan-ptet-LppOmpA-FLAG-J43scFv-V5-HIS"
tagcggagtgtatactggcttactatgttggcactgatgagggtgtcagtgaagtgcttcatgtggcaggagaaaaaaggctgcaccggtgcgtcagcagaatatgtgatacaggatatattccgcttcctcgctcactgactcgctacgctcggtcgttcgactgcggcgagcggaaatggcttacgaacggggcggagatttcctggaagatgccaggaagatacttaacagggaagtgagagggccgcggcaaagccgtttttccataggctccgcccccctgacaagcatcacgaaatctgacgctcaaatcagtggtggcgaaacccgacaggactataaagataccaggcgtttcccctggcggctccctcgtgcgctctcctgttcctgcctttcggtttaccggtgtcattccgctgttatggccgcgtttgtctcattccacgcctgacactcagttccgggtaggcagttcgctccaagctggactgtatgcacgaaccccccgttcagtccgaccgctgcgccttatccggtaactatcgtcttgagtccaacccggaaagacatgcaaaagcaccactggcagcagccactggtaattgatttagaggagttagtcttgaagtcatgcgccggttaaggctaaactgaaaggacaagttttggtgactgcgctcctccaagccagttacctcggttcaaagagttggtagctcagagaaccttcgaaaaaccgccctgcaaggcggttttttcgttttcagagcaagagattacgcgcagaccaaaacgatctcaagaagatcatcttattaaggggtctgacgctcagtggaacggtgcaccctgcagggctagctgataaagcgttcgcgctgcattcggcagtttaagacccactttcacatttaagttgtttttctaatccgcatatgatcaattcaaggccgaataagaaggctggctctgcaccttggtgatcaaataattcgatagcttgtcgtaataatggcggcatactatcagtagtaggtgtttccctttcttctttagcgacttgatgctcttgatcttccaatacgcaacctaaagtaaaatgccccacagcgctgagtgcatataatgcattctctagtgaaaaaccttgttggcataaaaaggctaattgattttcgagagtttcatactgtttttctgtaggccgtgtacctaaatgtacttttgctccatcgcgatgacttagtaaagcacatctaaaacttttagcgttattacgtaaaaaatcttgccagctttccccttctaaagggcaaaagtgagtatggtgcctatctaacatctcaatggctaaggcgtcgagcaaagcccgcttattttttacatgccaatacaatgtaggctgctctacacctagcttctgggcgagtttacgggttgttaaaccttcgattccgacctcattaagcagctctaatgcgctgttaatcactttacttttatctaatctagacatcattaattcctaatttttgttgacactctatcattgatagagttattttaccactccctatcagtgatagagaaaagtgaaaggaggtaaattatgactagtaaagcaacaaaacttgtgttaggcgcggttatacttggctccaccctgcttgcaggttgctcgtctaacgcgaagatcgaccagggtatcaatccttacgtcgggtttgaaatgggatacgattggttgggacgtatgccttataagggaagtgttgaaaacggcgcttataaggcgcagggagtacagttaacggccaagcttgggtaccccataacagacgatttagatatttatacccgtttaggaggaatggtttggagagccgacacgaagtctaatgtatatggtaagaaccacgacacgggagtatcccccgtctttgcagggggagtggaatatgctatcacaccagagatcgctacccgtttggaatatcaatggacgaataatataggcgacgcccatacgataggaacgcggcccgacaacggcatccctggggtcgactataaggatgacgacgacaagcaattggaagttcgcctgttggagagcggtggtggacttgtgaaacccgagggaagccttaaactttcgtgcgttgctagtgggttcacattttcagactatttcatgtcctgggtccgtcaagccccgggaaaaggacttgaatgggttgcccatatttacaccaagagctataactatgccacatactattctggaagcgttaaaggtcgttttaccatttcgcgtgacgacagccgttctatggtgtatttgcagatgaataaccttcgtacagaagatacggctacttactactgtactcgcgatggatcaggctatcccagtttagatttctggggacagggtactcaggttactgtttcaagcggtggaggcggctctggcggtggtgggagtggaggcggtggcagttacgagctgacgcagccaccctcggcaagtgtaaacgtgggcgaaacggtgaaaattacttgttcgggggatcaactgcccaaatacttcgccgattggtttcatcaacgttccgatcagactattttacaagtgatttatgatgataacaaacgtccgtcaggaatcccagagcgtatcagcggatcgagcagcggaacaacagcaactttgaccatccgcgatgtccgtgccgaagacgagggggactactattgtttctctggatacgtggactcagacagcaagctgtatgtttttggctcaggaacacaactgaccgtactgggcaagggcgagctcaattcgaagcttgaaggtaagcctatccctaaccctctcctcggcctcgattctacgcgtaccggtcatcatcaccatcaccattgagcatgcgaattcggtctcaggaggaacgattggtaaacccggtgaacgcatgagaaagcccccggaagatcaccttccgggggcttttttattgcgcggaccaaaacgaaaaaagacgctcgaaagcgtctcttttctggaatttggtaccgaggcgtaatgctctgccagtgttacaaccaattaaccaattctgattagaaaaactcatcgagcatcaaatgaaactgcaatttattcatatcaggattatcaataccatatttttgaaaaagccgtttctgtaatgaaggagaaaactcaccgaggcagttccataggatggcaagatcctggtatcggtctgcgattccgactcgtccaacatcaatacaacctattaatttcccctcgtcaaaaataaggttatcaagtgagaaatcaccatgagtgacgactgaatccggtgagaatggcaaaagcttatgcatttctttccagacttgttcaacaggccagccattacgctcgtcatcaaaatcactcgcatcaaccaaaccgttattcattcgtgattgcgcctgagcgagacgaaatacgcgatcgctgttaaaaggacaattacaaacaggaatcgaatgcaaccggcgcaggaacactgccagcgcatcaacaatattttcacctgaatcaggatattcttctaatacctggaatgctgttttcccggggatcgcagtggtgagtaaccatgcatcatcaggagtacggataaaatgcttgatggtcggaagaggcataaattccgtcagccagtttagtctgaccatctcatctgtaacatcattggcaacgctacctttgccatgtttcagaaacaactctggcgcatcgggcttcccatacaatcgatagattgtcgcacctgattgcccgacattatcgcgagcccatttatacccatataaatcagcatccatgttggaatttaatcgcggcctcgagcaagacgtttcccgttgaatatggctcataacaccccttgtattactgtttatgtaagcagacagttttattgttcatgatgatatatttttatcttgtgcaatgtaacatcagagattttgagacacaacgtggctttgttgaataaatcgaacttttgctgagttgaaggatcagatcacgcatcttcccgacaacgcagaccgttccgtggcaaagcaaaagttcaaaatcaccaactggtccacctacaacaaagctctcatcaaccgtggctccctcactttctggctggatgatggggcgattcaggcctggtatgagtcagcaacaccttcttcacgaggcagacctcagcgc

SEQ ID NO: 989 - DNA, 5864 bp, Artificial Sequence
  source: /note="Description of Artificial Sequence: Synthetic polynucleotide"
  source: /note="p15A-Kan-ptet-IntiminN-FLAG-J43scFv-V5-HIS"
tagcggagtgtatactggcttactatgttggcactgatgagggtgtcagtgaagtgcttcatgtggcaggagaaaaaaggctgcaccggtgcgtcagcagaatatgtgatacaggatatattccgcttcctcgctcactgactcgctacgctcggtcgttcgactgcggcgagcggaaatggcttacgaacggggcggagatttcctggaagatgccaggaagatacttaacagggaagtgagagggccgcggcaaagccgtttttccataggctccgcccccctgacaagcatcacgaaatctgacgctcaaatcagtggtggcgaaacccgacaggactataaagataccaggcgtttcccctggcggctccctcgtgcgctctcctgttcctgcctttcggtttaccggtgtcattccgctgttatggccgcgtttgtctcattccacgcctgacactcagttccgggtaggcagttcgctccaagctggactgtatgcacgaaccccccgttcagtccgaccgctgcgccttatccggtaactatcgtcttgagtccaacccggaaagacatgcaaaagcaccactggcagcagccactggtaattgatttagaggagttagtcttgaagtcatgcgccggttaaggctaaactgaaaggacaagttttggtgactgcgctcctccaagccagttacctcggttcaaagagttggtagctcagagaaccttcgaaaaaccgccctgcaaggcggttttttcgttttcagagcaagagattacgcgcagaccaaaacgatctcaagaagatcatcttattaaggggtctgacgctcagtggaacggtgcaccctgcagggctagctgataaagcgttcgcgctgcattcggcagtttaagacccactttcacatttaagttgtttttctaatccgcatatgatcaattcaaggccgaataagaaggctggctctgcaccttggtgatcaaataattcgatagcttgtcgtaataatggcggcatactatcagtagtaggtgtttccctttcttctttagcgacttgatgctcttgatcttccaatacgcaacctaaagtaaaatgccccacagcgctgagtgcatataatgcattctctagtgaaaaaccttgttggcataaaaaggctaattgattttcgagagtttcatactgtttttctgtaggccgtgtacctaaatgtacttttgctccatcgcgatgacttagtaaagcacatctaaaacttttagcgttattacgtaaaaaatcttgccagctttccccttctaaagggcaaaagtgagtatggtgcctatctaacatctcaatggctaaggcgtcgagcaaagcccgcttattttttacatgccaatacaatgtaggctgctctacacctagcttctgggcgagtttacgggttgttaaaccttcgattccgacctcattaagcagctctaatgcgctgttaatcactttacttttatctaatctagacatcattaattcctaatttttgttgacactctatcattgatagagttattttaccactccctatcagtgatagagaaaagtgaaaggaggtaaattatgactagtattacgcatggctgttatacccgtacgcgtcataaacacaagttgaagaaaactctgatcatgttatccgctggacttggactttttttttacgtgaatcagaactctttcgctaatggggaaaattattttaaactgggatcagacagcaaattacttacgcatgactcataccagaatcgtctgttttatacgctgaaaactggtgaaaccgttgcagatttaagtaaaagtcaggacattaacctgtcaactatttggtcacttaataaacacttatattcgagcgaatcggaaatgatgaaagctgcaccggggcaacaaatcatcttgcccctgaagaaattgccctttgaatactccgctttgcccttgctgggctcggctcctctggtagccgccggaggcgttgccggtcacactaataagctgacaaaaatgtcacccgacgtgacgaagagcaacatgacggatgataaggctttaaattacgcagctcagcaagcggcctcgttgggaagtcagttacagagtcgttcgttaaatggtgattatgctaaggataccgcattgggtattgccggcaaccaagcgtcgagccaacttcaggcatggttgcaacattacggcactgctgaagtaaatctgcaatcaggtaataattttgacggtagttccctggatttccttttacctttttacgattcagaaaagatgttggctttcggacaggtgggggcgcgttacatcgattcacgttttaccgctaacttgggggccggtcaacgcttcttcttacctgccaatatgttgggctataatgtatttatcgaccaggacttcagtggtgacaatacacgtctgggaattggtggagagtattggcgcgattactttaagtcatctgtaaatggctattttcgcatgagcggttggcatgaaagttacaacaagaaagactacgatgagcgccccgcgaacgggtttgacatccgttttaatggttatttgccatcttatcccgccttgggagctaaattaatctacgagcaatactatggagataacgtagctttgtttaatagcgacaagttacagtctaatccaggagcggctacagtgggagttaattataccccaatcccactggtcacaatgggaatcgattatcgccacgggactggtaatgaaaacgatttattatactccatgcagtttcgttatcagttcgataagagttggtcgcagcagattgagcctcaatatgttaacgaattacgtaccttgtccggcagtcgctacgatctggtacaacgcaataacaatatcatccttgagtataagaaacaggacattctgtctttgaacattccacatgatattaatggtaccgagcactcaacacaaaaaattcagctgattgtgaaatcaaagtatggactggaccgtatcgtgtgggatgatagcgctctgcgcagtcagggtggacagatccagcactcgggtagccagtctgcccaagactaccaggctatcctgccagcgtatgtccaagggggaagtaacatctacaaagttacagctcgcgcctattaccgcaacggtaattctagtaataatgtgcagttgacaattacggtgctgtccaatgggcaggtcgtcgatcaggtaggtgtgacggattttacagccgataaaacctctgcgaaggcagataacgcggataccatcacatacactgccactgtaaaaaaaaacggtgtcgcgcaggcaaacgttcctgttagcttcaacatcgtgtcgggtacagccacccttggggccaactcggcaaagactgacgcgaatggcaaggctacagtcacgttgaaatcctcgacaccaggacaggtcgttgtgtctgccaagacagcagagatgacctccgcccttaatgcatctgctgttatcttcttcgatcaaacgaaggcatctgtcgactataaggatgacgacgacaagcaattggaagttcgcctgttggagagcggtggtggacttgtgaaacccgagggaagccttaaactttcgtgcgttgctagtgggttcacattttcagactatttcatgtcctgggtccgtcaagccccgggaaaaggacttgaatgggttgcccatatttacaccaagagctataactatgccacatactattctggaagcgttaaaggtcgttttaccatttcgcgtgacgacagccgttctatggtgtatttgcagatgaataaccttcgtacagaagatacggctacttactactgtactcgcgatggatcaggctatcccagtttagatttctggggacagggtactcaggttactgtttcaagcggtggaggcggctctggcggtggtgggagtggaggcggtggcagttacgagctgacgcagccaccctcggcaagtgtaaacgtgggcgaaacggtgaaaattacttgttcgggggatcaactgcccaaatacttcgccgattggtttcatcaacgttccgatcagactattttacaagtgatttatgatgataacaaacgtccgtcaggaatcccagagcgtatcagcggatcgagcagcggaacaacagcaactttgaccatccgcgatgtccgtgccgaagacgagggggactactattgtttctctggatacgtggactcagacagcaagctgtatgtttttggctcaggaacacaactgaccgtactgggcaagggcgagctcaattcgaagcttgaaggtaagcctatccctaaccctctcctcggcctcgattctacgcgtaccggtcatcatcaccatcaccattgagcatgctaatcagccgtggaattcgcaacgtaaaaaaacccgccccggcgggtttttttataccggtctcaggaggaacgattggtaaacccggtgaacgcatgagaaagcccccggaagatcaccttccgggggcttttttattgcgcggaccaaaacgaaaaaagacgctcgaaagcgtctcttttctggaatttggtaccgaggcgtaatgctctgccagtgttacaaccaattaaccaattctgattagaaaaactcatcgagcatcaaatgaaactgcaatttattcatatcaggattatcaataccatatttttgaaaaagccgtttctgtaatgaaggagaaaactcaccgaggcagttccataggatggcaagatcctggtatcggtctgcgattccgactcgtccaacatcaatacaacctattaatttcccctcgtcaaaaataaggttatcaagtgagaaatcaccatgagtgacgactgaatccggtgagaatggcaaaagcttatgcatttctttccagacttgttcaacaggccagccattacgctcgtcatcaaaatcactcgcatcaaccaaaccgttattcattcgtgattgcgcctgagcgagacgaaatacgcgatcgctgttaaaaggacaattacaaacaggaatcgaatgcaaccggcgcaggaacactgccagcgcatcaacaatattttcacctgaatcaggatattcttctaatacctggaatgctgttttcccggggatcgcagtggtgagtaaccatgcatcatcaggagtacggataaaatgcttgatggtcggaagaggcataaattccgtcagccagtttagtctgaccatctcatctgtaacatcattggcaacgctacctttgccatgtttcagaaacaactctggcgcatcgggcttcccatacaatcgatagattgtcgcacctgattgcccgacattatcgcgagcccatttatacccatataaatcagcatccatgttggaatttaatcgcggcctcgagcaagacgtttcccgttgaatatggctcataacaccccttgtattactgtttatgtaagcagacagttttattgttcatgatgatatatttttatcttgtgcaatgtaacatcagagattttgagacacaacgtggctttgttgaataaatcgaacttttgctgagttgaaggatcagatcacgcatcttcccgacaacgcagaccgttccgtggcaaagcaaaagttcaaaatcaccaactggtccacctacaacaaagctctcatcaaccgtggctccctcactttctggctggatgatggggcgattcaggcctggtatgagtcagcaacaccttcttcacgaggcagacctcagcgc

SEQ ID NO: 990 - protein, 607 aa, Artificial Sequence
  source: /note="Description of Artificial Sequence: Synthetic polypeptide"
  source: /note="Invasin display tag"
MVFQPISEFLLIRNAGMSMYFNKIISFNIISRIVICIFLICGMFMAGASEKYDANAPQQVQPYSVSSSAFENLHPNNEMESSINPFSASDTERNAAIIDRANKEQETEAVNKMISTGARLAASGRASDVAHSMVGDAVNQEIKQWLNRFGTAQVNLNFDKNFSLKESSLDWLAPWYDSASFLFFSQLGIRNKDSRNTLNLGVGIRTLENGWLYGLNTFYDNDLTGHNHRIGLGAEAWTDYLQLAANGYFRLNGWHSSRDFSDYKERPATGGDLRANAYLPALPQLGGKLMYEQYTGERVALFGKDNLQRNPYAVTAGINYTPVPLLTVGVDQRMGKSSKHETQWNLQMNYRLGESFQSQLSPSAVAGTRLLAESRYNLVDRNNNIVLEYQKQQVVKLTLSPATISGLPGQVYQVNAQVQGASAVREIVWSDAELIAAGGTLTPLSTTQFNLVLPPYKRTAQVSRVTDDLTANFYSLSALAVDHQGNRSNSFTLSVTVQQPQLTLTAAVIGDGAPANGKTAITVEFTVADFEGKPLAGQEVVITTNNGALPNKITEKTDANGVARIALTNTTDGVTVVTAEVEGQRQSVDTHFVKGTIAADKSTLAAV

SEQ ID NO: 991 - protein, 148 aa, Artificial Sequence
  source: /note="Description of Artificial Sequence: Synthetic polypeptide"
  source: /note="LppOmpA display tag"
KATKLVLGAVILGSTLLAGCSSNAKIDQGINPYVGFEMGYDWLGRMPYKGSVENGAYKAQGVQLTAKLGYPITDDLDIYTRLGGMVWRADTKSNVYGKNHDTGVSPVFAGGVEYAITPEIATRLEYQWTNNIGDAHTIGTRPDNGIPG

SEQ ID NO: 992 - protein, 658 aa, Artificial Sequence
  source: /note="Description of Artificial Sequence: Synthetic polypeptide"
  source: /note="IntiminN display tag"
ITHGCYTRTRHKHKLKKTLIMLSAGLGLFFYVNQNSFANGENYFKLGSDSKLLTHDSYQNRLFYTLKTGETVADLSKSQDINLSTIWSLNKHLYSSESEMMKAAPGQQIILPLKKLPFEYSALPLLGSAPLVAAGGVAGHTNKLTKMSPDVTKSNMTDDKALNYAAQQAASLGSQLQSRSLNGDYAKDTALGIAGNQASSQLQAWLQHYGTAEVNLQSGNNFDGSSLDFLLPFYDSEKMLAFGQVGARYIDSRFTANLGAGQRFFLPANMLGYNVFIDQDFSGDNTRLGIGGEYWRDYFKSSVNGYFRMSGWHESYNKKDYDERPANGFDIRFNGYLPSYPALGAKLIYEQYYGDNVALFNSDKLQSNPGAATVGVNYTPIPLVTMGIDYRHGTGNENDLLYSMQFRYQFDKSWSQQIEPQYVNELRTLSGSRYDLVQRNNNIILEYKKQDILSLNIPHDINGTEHSTQKIQLIVKSKYGLDRIVWDDSALRSQGGQIQHSGSQSAQDYQAILPAYVQGGSNIYKVTARAYYRNGNSSNNVQLTITVLSNGQVVDQVGVTDFTADKTSAKADNADTITYTATVKKNGVAQANVPVSFNIVSGTATLGANSAKTDANGKATVTLKSSTPGQVVVSAKTAEMTSALNASAVIFFDQTKAS

SEQ ID NO: 993 - DNA, 5121 bp, Artificial Sequence
  source: /note="Description of Artificial Sequence: Synthetic polynucleotide"
  source: /note="pUC-ptet-B6H12antihCD47scFv-V5-HIS"
agcgcccaatacgcaaaccgcctctccccgcgcgttggccgattcattaatgcagctggcacgacaggtttcccgactggaaagcgggcagtgagcgcaacgcaattaatgtgagttagctcactcattaggcaccccaggctttacactttatgcttccggctcgtatgttgtgtggaattgtgagcggataacaatttcacacaggaaacagctatgaccatgattacgccaagctatttaggtgacactatagaatactcaagctatgcatcaagcttggtaccgagctcggatccactagtaacggccgccagtgtgctggaattcgcccttttaagacccactttcacatttaagttgtttttctaatccgcagatgatcaattcaaggccgaataagaaggctggctctgcaccttggtgatcaaataattcgatagcttgtcgtaataatggcggcatactatcagtagtaggtgtttccctttcttctttagcgacttgatgctcttgatcttccaatacgcaacctaaagtaaaatgccccacagcgctgagtgcatataatgcattctctagtgaaaaaccttgttggcataaaaaggctaattgattttcgagagtttcatactgtttttctgtaggccgtgtacctaaatgtacttttgctccatcgcgatgacttagtaaagcacatctaaaacttttagcgttattacgtaaaaaatcttgccagctttccccttctaaagggcaaaagtgagtatggtgcctatctaacatctcaatggctaaggcgtcgagcaaagcccgcttattttttacatgccaatacaatgtaggctgctctacacctagcttctgggcgagtttacgggttgttaaaccttcgattccgacctcattaagcagctctaatgcgctgttaatcactttacttttatctaatctagacatcattaattcctaatttttgttgacactctatcattgatagagttattttaccactccctatcagtgatagagaaaagtgaaaggaggtaaattcatatgactagtcaattgggtggtagcgaggtccagctggtggaatctggcggagacttagtaaagccgggaggttcgttgaagttgagttgcgctgctagtgggtttacgtttagcggctatggtatgtcatgggtccgccaaacacccgataaacgtttagagtgggtcgccacgattacgagtggaggcacctacacctattatccggattctgtcaaaggccgctttactatttctcgtgataatgcaaagaacaccttatatttacagatcgactccttgaagtctgaggataccgcaatttatttctgtgcccgttcgttagccggtaatgctatggattattgggggcaaggcacatctgtcacagtctcatccggaggaggcggatcaggtggtggcggttctggcggcggcggatctgacattgtgatgacacaatcacctgcgacactttcggttactccaggagaccgcgttagcttgtcgtgtcgcgcctctcaaaccatcagtgactacttacattggtaccaacagaaatcccatgaatcgccacgcttacttattaagtttgcgtcccaatcaattagtggtattccgtcgcgctttagtggtagcggttctggttctgatttcacattgtcaatcaacagcgtggagccggaggatgttggtgtttactactgccaaaacggtcacggctttccacgtacattcggagggggaacgaagttggaaattaaaggcagcggcgagctcggtggcagtggtaagcctatccctaaccctctcctcggcctcgattctacgggatccggtcatcatcaccatcaccattgagcatgctaatcagccgtggaattcgaattcggtctcaggaggaagggcgaattctgcagatatccatcacactggcggccgctcgagcatgcatctagagggcccaattcgccctatagtgagtcgtattacaattcactggccgtcgttttacaacgtcgtgactgggaaaaccctggcgttacccaacttaatcgccttgcagcacatccccctttcgccagctggcgtaatagcgaagaggcccgcaccgatcgcccttcccaacagttgcgcagcctatacgtacggcagtttaaggtttacacctataaaagagagagccgttatcgtctgtttgtggatgtacagagtgatattattgacacgccggggcgacggatggtgatccccctggccagtgcacgtctgctgtcagataaagtctcccgtgaactttacccggtggtgcatatcggggatgaaagctggcgcatgatgaccaccgatatggccagtgtgccggtctccgttatcggggaagaagtggctgatctcagccaccgcgaaaatgacatcaaaaacgccattaacctgatgttctggggaatataaatgtcaggcatgagattatcaaaaaggatcttcacctagatccttttcacgtagaaagccagtccgcagaaacggtgctgaccccggatgaatgtcagctactgggctatctggacaagggaaaacgcaagcgcaaagagaaagcaggtagcttgcagtgggcttacatggcgatagctagactgggcggttttatggacagcaagcgaaccggaattgccagctggggcgccctctggtaaggttgggaagccctgcaaagtaaactggatggctttctcgccgccaaggatctgatggcgcaggggatcaagctctgatcaagagacaggatgaggatcgtttcgcatgattgaacaagatggattgcacgcaggttctccggccgcttgggtggagaggctattcggctatgactgggcacaacagacaatcggctgctctgatgccgccgtgttccggctgtcagcgcaggggcgcccggttctttttgtcaagaccgacctgtccggtgccctgaatgaactgcaagacgaggcagcgcggctatcgtggctggccacgacgggcgttccttgcgcagctgtgctcgacgttgtcactgaagcgggaagggactggctgctattgggcgaagtgccggggcaggatctcctgtcatctcaccttgctcctgccgagaaagtatccatcatggctgatgcaatgcggcggctgcatacgcttgatccggctacctgcccattcgaccaccaagcgaaacatcgcatcgagcgagcacgtactcggatggaagccggtcttgtcgatcaggatgatctggacgaagagcatcaggggctcgcgccagccgaactgttcgccaggctcaaggcgagcatgcccgacggcgaggatctcgtcgtgacccatggcgatgcctgcttgccgaatatcatggtggaaaatggccgcttttctggattcatcgactgtggccggctgggtgtggcggaccgctatcaggacatagcgttggctacccgtgatattgctgaagagcttggcggcgaatgggctgaccgcttcctcgtgctttacggtatcgccgctcccgattcgcagcgcatcgccttctatcgccttcttgacgagttcttctgaattattaacgcttacaatttcctgatgcggtattttctccttacgcatctgtgcggtatttcacaccgcatacaggtggcacttttcggggaaatgtgcgcggaacccctatttgtttatttttctaaatacattcaaatatgtatccgctcatgagacaataaccctgataaatgcttcaataatagcacgtgaggagggccaccatggccaagttgaccagtgccgttccggtgctcaccgcgcgcgacgtcgccggagcggtcgagttctggaccgaccggctcgggttctcccgggacttcgtggaggacgacttcgccggtgtggtccgggacgacgtgaccctgttcatcagcgcggtccaggaccaggtggtgccggacaacaccctggcctgggtgtgggtgcgcggcctggacgagctgtacgccgagtggtcggaggtcgtgtccacgaacttccgggacgcctccgggccggccatgaccgagatcggcgagcagccgtgggggcgggagttcgccctgcgcgacccggccggcaactgcgtgcacttcgtggccgaggagcaggactgacacgtgctaaaacttcatttttaatttaaaaggatctaggtgaagatcctttttgataatctcatgaccaaaatcccttaacgtgagttttcgttccactgagcgtcagaccccgtagaaaagatcaaaggatcttcttgagatcctttttttctgcgcgtaatctgctgcttgcaaacaaaaaaaccaccgctaccagcggtggtttgtttgccggatcaagagctaccaactctttttccgaaggtaactggcttcagcagagcgcagataccaaatactgtccttctagtgtagccgtagttaggccaccacttcaagaactctgtagcaccgcctacatacctcgctctgctaatcctgttaccagtggctgctgccagtggcgataagtcgtgtcttaccgggttggactcaagacgatagttaccggataaggcgcagcggtcgggctgaacggggggttcgtgcacacagcccagcttggagcgaacgacctacaccgaactgagatacctacagcgtgagctatgagaaagcgccacgcttcccgaagggagaaaggcggacaggtatccggtaagcggcagggtcggaacaggagagcgcacgagggagcttccagggggaaacgcctggtatctttatagtcctgtcgggtttcgccacctctgacttgagcgtcgatttttgtgatgctcgtcaggggggcggagcctatggaaaaacgccagcaacgcggcctttttacggttcctgggcttttgctggccttttgctcacatgttctttcctgcgttatcccctgattctgtggataaccgtattaccgcctttgagtgagctgataccgctcgccgcagccgaacgaccgagcgcagcgagtcagtgagcgaggaagcggaag

SEQ ID NO: 994 - protein, 240 aa, Artificial Sequence
  source: /note="Description of Artificial Sequence: Synthetic polypeptide"
  source: /note="B6H12-anti-CD47-scFv polypeptide sequence"
EVQLVESGGDLVKPGGSLKLSCAASGFTFSGYGMSWVRQTPDKRLEWVATITSGGTYTYYPDSVKGRFTISRDNAKNTLYLQIDSLKSEDTAIYFCARSLAGNAMDYWGQGTSVTVSSGGGGSGGGGSGGGGSDIVMTQSPATLSVTPGDRVSLSCRASQTISDYLHWYQQKSHESPRLLIKFASQSISGIPSRFSGSGSGSDFTLSINSVEPEDVGVYYCQNGHGFPRTFGGGTKLEIK

SEQ ID NO: 995 - DNA, 5133 bp, Artificial Sequence
  source: /note="Description of Artificial Sequence: Synthetic polynucleotide"
  source: /note="pUC-ptet-5F9antihCD47scFv-V5-HIS"
agcgcccaatacgcaaaccgcctctccccgcgcgttggccgattcattaatgcagctggcacgacaggtttcccgactggaaagcgggcagtgagcgcaacgcaattaatgtgagttagctcactcattaggcaccccaggctttacactttatgcttccggctcgtatgttgtgtggaattgtgagcggataacaatttcacacaggaaacagctatgaccatgattacgccaagctatttaggtgacactatagaatactcaagctatgcatcaagcttggtaccgagctcggatccactagtaacggccgccagtgtgctggaattcgcccttttaagacccactttcacatttaagttgtttttctaatccgcagatgatcaattcaaggccgaataagaaggctggctctgcaccttggtgatcaaataattcgatagcttgtcgtaataatggcggcatactatcagtagtaggtgtttccctttcttctttagcgacttgatgctcttgatcttccaatacgcaacctaaagtaaaatgccccacagcgctgagtgcatataatgcattctctagtgaaaaaccttgttggcataaaaaggctaattgattttcgagagtttcatactgtttttctgtaggccgtgtacctaaatgtacttttgctccatcgcgatgacttagtaaagcacatctaaaacttttagcgttattacgtaaaaaatcttgccagctttccccttctaaagggcaaaagtgagtatggtgcctatctaacatctcaatggctaaggcgtcgagcaaagcccgcttattttttacatgccaatacaatgtaggctgctctacacctagcttctgggcgagtttacgggttgttaaaccttcgattccgacctcattaagcagctctaatgcgctgttaatcactttacttttatctaatctagacatcattaattcctaatttttgttgacactctatcattgatagagttattttaccactccctatcagtgatagagaaaagtgaaaggaggtaaattcatatgactagtcaattgggtggtagccaggtgcagcttgtgcagagtggcgctgaagtgaagaaaccgggcgcatcagtgaaagtgagctgcaaagcaagcggttataccttcacgaactataacatgcactgggtacgtcaagcacccggccagcgtcttgagtggatgggcaccatttatcctggaaacgacgacacatcctacaaccaaaagtttaaggaccgcgtaactatcactgctgacacttcagcttccacagcatatatggagcttagtagcctgcgtagtgaagacacagcggtctactactgcgcacgtggagggtatcgtgcgatggactactgggggcagggcacacttgtgactgtttcatctggcggtggaggctctggaggggggggtagcggggggggcggtagcgatatcgtaatgactcagtccccactttccttacccgtcacaccgggcgaacctgcatctattagctgtcgttcgtcgcaaagcattgtttactcgaatgggaatacgtacttggggtggtatcttcaaaaaccagggcagtcccctcagttgttgatctacaaggtgtccaaccgctttagtggggtgcctgatcgtttctctggcagtggtagtggtaccgacttcacgcttaaaatttcccgtgtcgaagcagaagacgttggcgtatattactgcttccaaggcagtcatgtgccatacacgttcgggcaaggcaccaaacttgagatcaaaggcagcggcgagctcggtggcagtggtaagcctatccctaaccctctcctcggcctcgattctacgggatccggtcatcatcaccatcaccattgagcatgctaatcagccgtggaattcgaattcggtctcaggaggaagggcgaattctgcagatatccatcacactggcggccgctcgagcatgcatctagagggcccaattcgccctatagtgagtcgtattacaattcactggccgtcgttttacaacgtcgtgactgggaaaaccctggcgttacccaacttaatcgccttgcagcacatccccctttcgccagctggcgtaatagcgaagaggcccgcaccgatcgcccttcccaacagttgcgcagcctatacgtacggcagtttaaggtttacacctataaaagagagagccgttatcgtctgtttgtggatgtacagagtgatattattgacacgccggggcgacggatggtgatccccctggccagtgcacgtctgctgtcagataaagtctcccgtgaactttacccggtggtgcatatcggggatgaaagctggcgcatgatgaccaccgatatggccagtgtgccggtctccgttatcggggaagaagtggctgatctcagccaccgcgaaaatgacatcaaaaacgccattaacctgatgttctggggaatataaatgtcaggcatgagattatcaaaaaggatcttcacctagatccttttcacgtagaaagccagtccgcagaaacggtgctgaccccggatgaatgtcagctactgggctatctggacaagggaaaacgcaagcgcaaagagaaagcaggtagcttgcagtgggcttacatggcgatagctagactgggcggttttatggacagcaagcgaaccggaattgccagctggggcgccctctggtaaggttgggaagccctgcaaagtaaactggatggctttctcgccgccaaggatctgatggcgcaggggatcaagctctgatcaagagacaggatgaggatcgtttcgcatgattgaacaagatggattgcacgcaggttctccggccgcttgggtggagaggctattcggctatgactgggcacaacagacaatcggctgctctgatgccgccgtgttccggctgtcagcgcaggggcgcccggttctttttgtcaagaccgacctgtccggtgccctgaatgaactgcaagacgaggcagcgcggctatcgtggctggccacgacgggcgttccttgcgcagctgtgctcgacgttgtcactgaagcgggaagggactggctgctattgggcgaagtgccggggcaggatctcctgtcatctcaccttgctcctgccgagaaagtatccatcatggctgatgcaatgcggcggctgcatacgcttgatccggctacctgcccattcgaccaccaagcgaaacatcgcatcgagcgagcacgtactcggatggaagccggtcttgtcgatcaggatgatctggacgaagagcatcaggggctcgcgccagccgaactgttcgccaggctcaaggcgagcatgcccgacggcgaggatctcgtcgtgacccatggcgatgcctgcttgccgaatatcatggtggaaaatggccgcttttctggattcatcgactgtggccggctgggtgtggcggaccgctatcaggacatagcgttggctacccgtgatattgctgaagagcttggcggcgaatgggctgaccgcttcctcgtgctttacggtatcgccgctcccgattcgcagcgcatcgccttctatcgccttcttgacgagttcttctgaattattaacgcttacaatttcctgatgcggtattttctccttacgcatctgtgcggtatttcacaccgcatacaggtggcacttttcggggaaatgtgcgcggaacccctatttgtttatttttctaaatacattcaaatatgtatccgctcatgagacaataaccctgataaatgcttcaataatagcacgtgaggagggccaccatggccaagttgaccagtgccgttccggtgctcaccgcgcgcgacgtcgccggagcggtcgagttctggaccgaccggctcgggttctcccgggacttcgtggaggacgacttcgccggtgtggtccgggacgacgtgaccctgttcatcagcgcggtccaggaccaggtggtgccggacaacaccctggcctgggtgtgggtgcgcggcctggacgagctgtacgccgagtggtcggaggtcgtgtccacgaacttccgggacgcctccgggccggccatgaccgagatcggcgagcagccgtgggggcgggagttcgccctgcgcgacccggccggcaactgcgtgcacttcgtggccgaggagcaggactgacacgtgctaaaacttcatttttaatttaaaaggatctaggtgaagatcctttttgataatctcatgaccaaaatcccttaacgtgagttttcgttccactgagcgtcagaccccgtagaaaagatcaaaggatcttcttgagatcctttttttctgcgcgtaatctgctgcttgcaaacaaaaaaaccaccgctaccagcggtggtttgtttgccggatcaagagctaccaactctttttccgaaggtaactggcttcagcagagcgcagataccaaatactgtccttctagtgtagccgtagttaggccaccacttcaagaactctgtagcaccgcctacatacctcgctctgctaatcctgttaccagtggctgctgccagtggcgataagtcgtgtcttaccgggttggactcaagacgatagttaccggataaggcgcagcggtcgggctgaacggggggttcgtgcacacagcccagcttggagcgaacgacctacaccgaactgagatacctacagcgtgagctatgagaaagcgccacgcttcccgaagggagaaaggcggacaggtatccggtaagcggcagggtcggaacaggagagcgcacgagggagcttccagggggaaacgcctggtatctttatagtcctgtcgggtttcgccacctctgacttgagcgtcgatttttgtgatgctcgtcaggggggcggagcctatggaaaaacgccagcaacgcggcctttttacggttcctgggcttttgctggccttttgctcacatgttctttcctgcgttatcccctgattctgtggataaccgtattaccgcctttgagtgagctgataccgctcgccgcagccgaacgaccgagcgcagcgagtcagtgagcgaggaagcggaag

SEQ ID NO: 996 - protein, 244 aa, Artificial Sequence
  source: /note="Description of Artificial Sequence: Synthetic polypeptide"
  source: /note="5F9-anti-CD47-scFv polypeptide sequence"
QVQLVQSGAEVKKPGASVKVSCKASGYTFTNYNMHWVRQAPGQRLEWMGTIYPGNDDTSYNQKFKDRVTITADTSASTAYMELSSLRSEDTAVYYCARGGYRAMDYWGQGTLVTVSSGGGGSGGGGSGGGGSDIVMTQSPLSLPVTPGEPASISCRSSQSIVYSNGNTYLGWYLQKPGQSPQLLIYKVSNRFSGVPDRFSGSGSGTDFTLKISRVEAEDVGVYYCFQGSHVPYTFGQGTKLEIK

SEQ ID NO: 997 - DNA, 2555 bp, Artificial Sequence
  source: /note="Description of Artificial Sequence: Synthetic polynucleotide"
  source: /note="Biosafety Plasmid System Component  dap A"
actcttcctttttcaatattattgaagcatttatcagggttattgtctcatgagcggatacatatttgaatgtatttagaaaaataaacaaataggggaattaaaaaaaagcccgctcattaggcgggctactacctaggccgcggccgcgcgaattcgagctcggtacccggggatcctctagagtcgacctgcaggcatgcaagcttgcggccgcgtcgtgactgggaaaaccctggcgactagtcttggactcctgttgatagatccagtaatgacctcagaactccatctggatttgttcagaacgctcggttgccgccgggcgttttttattggtgagaatccaggggtccccaataattacgatttaaatcacagcaaacaccacgtcggccctatcagctgcgtgctttctatgagtcgttgctgcataacttgacaattaacatccggctcgtagggtttgtggagggcccaagttcacttaaaaaggagatcaacaatgaaagcaattttcgtactgaaacatcttaatcatgctggggagggtttctaatgttcacgggaagtattgtcgcgattgttactccgatggatgaaaaaggtaatgtctgtcgggctagcttgaaaaaactgattgattatcatgtcgccagcggtacttcggcgatcgtttctgttggcaccactggcgagtccgctaccttaaatcatgacgaacatgctgatgtggtgatgatgacgctggatctggctgatgggcgcattccggtaattgccgggaccggcgctaacgctactgcggaagccattagcctgacgcagcgcttcaatgacagtggtatcgtcggctgcctgacggtaaccccttactacaatcgtccgtcgcaagaaggtttgtatcagcatttcaaagccatcgctgagcatactgacctgccgcaaattctgtataatgtgccgtcccgtactggctgcgatctgctcccggaaacggtgggccgtctggcgaaagtaaaaaatattatcggaatcaaagaggcaacagggaacttaacgcgtgtaaaccagatcaaagagctggtttcagatgattttgttctgctgagcggcgatgatgcgagcgcgctggacttcatgcaattgggcggtcatggggttatttccgttacggctaacgtcgcagcgcgtgatatggcccagatgtgcaaactggcagcagaagggcattttgccgaggcacgcgttattaatcagcgtctgatgccattacacaacaaactatttgtcgaacccaatccaatcccggtgaaatgggcatgtaaggaactgggtcttgtggcgaccgatacgctgcgcctgccaatgacaccaatcaccgacagtggccgtgagacggtcagagcggcgcttaaacatgccggtttgctgtaagacttttgtcaggttcctactgtgacgactaccaccgatagactggagtgttgctgcgaaaaaaccccgccgaagcggggttttttgcgagaagtcaccacgattgtgctttacacggagtagtcggcagttccttaagtcagaatagtggacaggcggccaagaacttcgttcatgatagtctccggaacccgttcgagtcgttttccgccccgtgctttcatatcaattgtccggggttgatcgcaacgtacaacacctgtggtacgtatgccaacaccatccaacgacaccgcaaagccggcagtgcgggcaaaattgcctccgctggttacgggcacaacaacaggcaggcgggtcacgcgattaaaggccgccggtgtgacaatcagcaccggccgcgttccctgctgctcatgacctgcggtaggatcaagcgagacaagccagatttcccctctttccatctagtataactattgtttctctagtaacatttattgtacaacacgagcccatttttgtcaaataaattttaaattatatcaacgttaataagacgttgtcaataaaattattttgacaaaattggccggccggcgcgccgatctgaagatcagcagttcaacctgttgatagtacgtactaagctctcatgtttcacgtactaagctctcatgtttaacgtactaagctctcatgtttaacgaactaaaccctcatggctaacgtactaagctctcatggctaacgtactaagctctcatgtttcacgtactaagctctcatgtttgaacaataaaattaatataaatcagcaacttaaatagcctctaaggttttaagttttataagaaaaaaaagaatatataaggcttttaaagcctttaaggtttaacggttgtggacaacaagccagggatgtaacgcactgagaagcccttagagcctctcaaagcaattttgagtgacacaggaacacttaacggctgacatggggcgcgcccagctgtctagggcggcggatttgtcctactcaggagagcgttcaccgacaaacaacagataaaacgaaaggcccagtctttcgactgagcctttcgttttatttgatgcct

SEQ ID NO: 998 - DNA, 2472 bp, Artificial Sequence
  source: /note="Description of Artificial Sequence: Synthetic polynucleotide"
  source: /note="Biosafety Plasmid System Component  ThyA"
actcttcctttttcaatattattgaagcatttatcagggttattgtctcatgagcggatacatatttgaatgtatttagaaaaataaacaaataggggaattaaaaaaaagcccgctcattaggcgggctactacctaggccgcggccgcgcgaattcgagctcggtacccggggatcctctagagtcgacctgcaggcatgcaagcttgcggccgcgtcgtgactgggaaaaccctggcgactagtcttggactcctgttgatagatccagtaatgacctcagaactccatctggatttgttcagaacgctcggttgccgccgggcgttttttattggtgagaatccaggggtccccaataattacgatttaaatcacagcaaacaccacgtcggccctatcagctgcgtgctttctatgagtcgttgctgcataacttgacaattaatcatccggctcgtagggtttgtggagggcccaagttcacttaaaaaggagatcaacaatgaaagcaattttcgtactgaaacatcttaatcatgctggggagggtttctaatgaaacagtatttagaactgatgcaaaaagtgctcgacgaaggcacacagaaaaacgaccgtaccggaaccggaacgctttccatttttggtcatcagatgcgttttaacctgcaagatggattcccgctggtgacaactaaacgttgccacctgcgttccatcatccatgaactgctgtggtttcttcagggcgacactaacattgcttatctacacgaaaacaatgtcaccatctgggacgaatgggccgatgaaaacggcgacctcgggccagtgtatggtaaacagtggcgtgcctggccaacgccagatggtcgtcatattgaccagatcactacggtactgaaccagctgaaaaacgacccggattcgcgccgcattattgtttcagcgtggaacgtaggcgaactggataaaatggcgctggcaccgtgccatgcattcttccagttctatgtggcagacggcaaactctcttgccagctttatcagcgctcctgtgacgtcttcctcggcctgccgttcaacattgccagctacgcgttattggtgcatatgatggcgcagcagtgcgatctggaagtgggtgattttgtctggaccggtggcgacacgcatctgtacagcaaccatatggatcaaactcatctgcaattaagccgcgaaccgcgtccgctgccgaagttgattatcaaacgtaaacccgaatccatcttcgactaccgtttcgaagactttgagattgaaggctacgatccgcatccgggcattaaagcgccggtggctatctaagacttttgtcaggttcctactgtgacgactaccaccgatagactggagtgttgctgcgaaaaaaccccgccgaagcggggttttttgcgagaagtcaccacgattgtgctttacacggagtagtcggcagttccttaagtcagaatagtggacaggcggccaagaacttcgttcatgatagtctccggaacccgttcgagtcgttttccgccccgtgctttcatatcaattgtccggggttgatcgcaacgtacaacacctgtggtacgtatgccaacaccatccaacgacaccgcaaagccggcagtgcgggcaaaattgcctccgctggttacgggcacaacaacaggcaggcgggtcacgcgattaaaggccgccggtgtgacaatcagcaccggccgcgttccctgctgctcatgacctgcggtaggatcaagcgagacaagccagatttcccctctttccatctagtataactattgtttctctagtaacatttattgtacaacacgagcccatttttgtcaaataaattttaaattatatcaacgttaataagacgttgtcaataaaattattttgacaaaattggccggccggcgcgccgatctgaagatcagcagttcaacctgttgatagtacgtactaagctctcatgtttcacgtactaagctctcatgtttaacgtactaagctctcatgtttaacgaactaaaccctcatggctaacgtactaagctctcatggctaacgtactaagctctcatgtttcacgtactaagctctcatgtttgaacaataaaattaatataaatcagcaacttaaatagcctctaaggttttaagttttataagaaaaaaaagaatatataaggcttttaaagcctttaaggtttaacggttgtggacaacaagccagggatgtaacgcactgagaagcccttagagcctctcaaagcaattttgagtgacacaggaacacttaacggctgacatggggcgcgcccagctgtctagggcggcggatttgtcctactcaggagagcgttcaccgacaaacaacagataaaacgaaaggcccagtctttcgactgagcctttcgttttatttgatgcct

SEQ ID NO: 999 - DNA, 333 bp, Artificial Sequence
  source: /note="Description of Artificial Sequence: Synthetic polynucleotide"
  source: /note="Kid toxin (reverse orientation)"
ttaagtcagaatagtggacaggcggccaagaacttcgttcatgatagtctccggaacccgttcgagtcgttttccgccccgtgctttcatatcaattgtccggggttgatcgcaacgtacaacacctgtggtacgtatgccaacaccatccaacgacaccgcaaagccggcagtgcgggcaaaattgcctccgctggttacgggcacaacaacaggcaggcgggtcacgcgattaaaggccgccggtgtgacaatcagcaccggccgcgttccctgctgctcatgacctgcggtaggatcaagcgagacaagccagatttcccctctttccat

SEQ ID NO: 1000 - DNA, 879 bp, Artificial Sequence
  source: /note="Description of Artificial Sequence: Synthetic polynucleotide"
  source: /note="dapA"
atgttcacgggaagtattgtcgcgattgttactccgatggatgaaaaaggtaatgtctgtcgggctagcttgaaaaaactgattgattatcatgtcgccagcggtacttcggcgatcgtttctgttggcaccactggcgagtccgctaccttaaatcatgacgaacatgctgatgtggtgatgatgacgctggatctggctgatgggcgcattccggtaattgccgggaccggcgctaacgctactgcggaagccattagcctgacgcagcgcttcaatgacagtggtatcgtcggctgcctgacggtaaccccttactacaatcgtccgtcgcaagaaggtttgtatcagcatttcaaagccatcgctgagcatactgacctgccgcaaattctgtataatgtgccgtcccgtactggctgcgatctgctcccggaaacggtgggccgtctggcgaaagtaaaaaatattatcggaatcaaagaggcaacagggaacttaacgcgtgtaaaccagatcaaagagctggtttcagatgattttgttctgctgagcggcgatgatgcgagcgcgctggacttcatgcaattgggcggtcatggggttatttccgttacggctaacgtcgcagcgcgtgatatggcccagatgtgcaaactggcagcagaagggcattttgccgaggcacgcgttattaatcagcgtctgatgccattacacaacaaactatttgtcgaacccaatccaatcccggtgaaatgggcatgtaaggaactgggtcttgtggcgaccgatacgctgcgcctgccaatgacaccaatcaccgacagtggccgtgagacggtcagagcggcgcttaaacatgccggtttgctgtaa

SEQ ID NO: 1001 - DNA, 795 bp, Artificial Sequence
  source: /note="Description of Artificial Sequence: Synthetic polynucleotide"
  source: /note="thyA"
atgaaacagtatttagaactgatgcaaaaagtgctcgacgaaggcacacagaaaaacgaccgtaccggaaccggaacgctttccatttttggtcatcagatgcgttttaacctgcaagatggattcccgctggtgacaactaaacgttgccacctgcgttccatcatccatgaactgctgtggtttcttcagggcgacactaacattgcttatctacacgaaaacaatgtcaccatctgggacgaatgggccgatgaaaacggcgacctcgggccagtgtatggtaaacagtggcgtgcctggccaacgccagatggtcgtcatattgaccagatcactacggtactgaaccagctgaaaaacgacccggattcgcgccgcattattgtttcagcgtggaacgtaggcgaactggataaaatggcgctggcaccgtgccatgcattcttccagttctatgtggcagacggcaaactctcttgccagctttatcagcgctcctgtgacgtcttcctcggcctgccgttcaacattgccagctacgcgttattggtgcatatgatggcgcagcagtgcgatctggaagtgggtgattttgtctggaccggtggcgacacgcatctgtacagcaaccatatggatcaaactcatctgcaattaagccgcgaaccgcgtccgctgccgaagttgattatcaaacgtaaacccgaatccatcttcgactaccgtttcgaagactttgagattgaaggctacgatccgcatccgggcattaaagcgccggtggctatctaa

SEQ ID NO: 1002 - protein, 110 aa, Artificial Sequence
  source: /note="Description of Artificial Sequence: Synthetic polypeptide"
  source: /note="Kid toxin polypeptide"
MERGEIWLVSLDPTAGHEQQGTRPVLIVTPAAFNRVTRLPVVVPVTSGGNFARTAGFAVSLDGVGIRTTGVVRCDQPRTIDMKARGGKRLERVPETIMNEVLGRLSTILT

SEQ ID NO: 1003 - protein, 292 aa, Artificial Sequence
  source: /note="Description of Artificial Sequence: Synthetic polypeptide"
  source: /note="dapA polypeptide"
MFTGSIVAIVTPMDEKGNVCRASLKKLIDYHVASGTSAIVSVGTTGESATLNHDEHADVVMMTLDLADGRIPVIAGTGANATAEAISLTQRFNDSGIVGCLTVTPYYNRPSQEGLYQHFKAIAEHTDLPQILYNVPSRTGCDLLPETVGRLAKVKNIIGIKEATGNLTRVNQIKELVSDDFVLLSGDDASALDFMQLGGHGVISVTANVAARDMAQMCKLAAEGHFAEARVINQRLMPLHNKLFVEPNPIPVKWACKELGLVATDTLRLPMTPITDSGRETVRAALKHAGLL

SEQ ID NO: 1004 - protein, 264 aa, Artificial Sequence
  source: /note="Description of Artificial Sequence: Synthetic polypeptide"
  source: /note="ThyA polypeptide"
MKQYLELMQKVLDEGTQKNDRTGTGTLSIFGHQMRFNLQDGFPLVTTKRCHLRSIIHELLWFLQGDTNIAYLHENNVTIWDEWADENGDLGPVYGKQWRAWPTPDGRHIDQITTVLNQLKNDPDSRRIIVSAWNVGELDKMALAPCHAFFQFYVADGKLSCQLYQRSCDVFLGLPFNIASYALLVHMMAQQCDLEVGDFVWTGGDTHLYSNHMDQTHLQLSREPRPLPKLIIKRKPESIFDYRFEDFEIEGYDPHPGIKAPVAI

SEQ ID NO: 1005 - DNA, 1490 bp, Artificial Sequence
  source: /note="Description of Artificial Sequence: Synthetic polynucleotide"
  source: /note="Biosafety Chromosomal Construct -  low copy Rep (Pi) and Kis antitoxin (as shown in Fig. 76C)"
ttgacggctagctcagtcctaggtacagtgctagcggatctgctggaacaggtggtgagactcaaggtcatgatggacgtgaacaaaaaaacgaaaattcgccaccgaaacgagctaaatcacaccctggctcaacttcctttgcccgcaaagcgagtgatgtatatggcgcttgctcccattgatagcaaagaacctcttgaacgagggcgagttttcaaaattagggctgaagaccttgcagcgctcgccaaaatcaccccatcgcttgcttatcgacaattaaaagagggtggtaaattacttggtgccagcaaaatttcgctaagaggggatgatatcattgctttagctaaagagcttaacctgctctttactgctaaaaactcccctgaagagttagaccttaacattattgagtggatagcttattcaaatgatgaaggatacttgtctttaaaattcaccagaaccatagaaccatatatctctagccttattgggaaaaaaaataaattcacaacgcaattgttaacggcaagcttacgcttaagtagccagtattcatcttctctttatcaacttatcaggaagcattactctaattttaagaagaaaaattattttattatttccgttgatgagttaaaggaagagttaatagcttatacttttgataaagatggaaatattgagtacaaataccctgactttcctatttttaaaagggatgtgttaaataaagccattgctgaaattaaaaagaaaacagaaatatcgtttgttggcttcactgttcatgaaaaagaaggaagaaaaattagtaagctgaagttcgaatttgtcgttgatgaagatgaattttctggcgataaagatgatgaagctttttttatgaatttatctgaagctgatgcagcttttctcaaggtatttgatgaaaccgtacctcccaaaaaagctaaggggtgaggatctccaggcatcaaataaaacgaaaggctcagtcgaaagactgggcctttcgttttatctgttgtttgtcggtgaacgctctctactagagtcacactggctcaccttcgggtgggcctttctgcgtttatacccgggaaaaagagtattgacttaaagtctaacctataggtataatgtgtggagaccagaggtaaggaggtaacaaccatgcgagtgttgaagaaacatcttaatcatgctaaggaggttttctaatgcataccacccgactgaagagggttggcggctcagttatgctgaccgtcccaccggcactgctgaatgcgctgtctctgggcacagataatgaagttggcatggtcattgataatggccggctgattgttgagccgtacagacgcccgcaatattcactggctgagctactggcacagtgtgatccgaatgctgaaatatcagctgaagaacgagaatggctggatgcaccggcgactggtcaggaggaaatctga

SEQ ID NO: 1006 - DNA, 1490 bp, Artificial Sequence
  source: /note="Description of Artificial Sequence: Synthetic polynucleotide"
  source: /note="Biosafety Chromosomal Construct -  medium copy Rep (Pi) and Kis antitoxin (as shown in Fig. 76D)"
ttgacggctagctcagtcctaggtacagtgctagcggatcttccggaagactaggtgagactcaaggtcatgatggacgtgaacaaaaaaacgaaaattcgccaccgaaacgagctaaatcacaccctggctcaacttcctttgcccgcaaagcgagtgatgtatatggcgcttgctcccattgatagcaaagaacctcttgaacgagggcgagttttcaaaattagggctgaagaccttgcagcgctcgccaaaatcaccccatcgcttgcttatcgacaattaaaagagggtggtaaattacttggtgccagcaaaatttcgctaagaggggatgatatcattgctttagctaaagagcttaacctgctctttactgctaaaaactcccctgaagagttagaccttaacattattgagtggatagcttattcaaatgatgaaggatacttgtctttaaaattcaccagaaccatagaaccatatatctctagccttattgggaaaaaaaataaattcacaacgcaattgttaacggcaagcttacgcttaagtagccagtattcatcttctctttatcaacttatcaggaagcattactctaattttaagaagaaaaattattttattatttccgttgatgagttaaaggaagagttaatagcttatacttttgataaagatggaaatattgagtacaaataccctgactttcctatttttaaaagggatgtgttaaataaagccattgctgaaattaaaaagaaaacagaaatatcgtttgttggcttcactgttcatgaaaaagaaggaagaaaaattagtaagctgaagttcgaatttgtcgttgatgaagatgaattttctggcgataaagatgatgaagctttttttatgaatttatctgaagctgatgcagcttttctcaaggtatttgatgaaaccgtacctcccaaaaaagctaaggggtgaggatctccaggcatcaaataaaacgaaaggctcagtcgaaagactgggcctttcgttttatctgttgtttgtcggtgaacgctctctactagagtcacactggctcaccttcgggtgggcctttctgcgtttatacccgggaaaaagagtattgacttaaagtctaacctataggtataatgtgtggagaccagaggtaaggaggtaacaaccatgcgagtgttgaagaaacatcttaatcatgctaaggaggttttctaatgcataccacccgactgaagagggttggcggctcagttatgctgaccgtcccaccggcactgctgaatgcgctgtctctgggcacagataatgaagttggcatggtcattgataatggccggctgattgttgagccgtacagacgcccgcaatattcactggctgagctactggcacagtgtgatccgaatgctgaaatatcagctgaagaacgagaatggctggatgcaccggcgactggtcaggaggaaatctga

SEQ ID NO: 1007 - DNA, 917 bp, Artificial Sequence
  source: /note="Description of Artificial Sequence: Synthetic polynucleotide"
  source: /note="Rep (Pi)"
tgagactcaaggtcatgatggacgtgaacaaaaaaacgaaaattcgccaccgaaacgagctaaatcacaccctggctcaacttcctttgcccgcaaagcgagtgatgtatatggcgcttgctcccattgatagcaaagaacctcttgaacgagggcgagttttcaaaattagggctgaagaccttgcagcgctcgccaaaatcaccccatcgcttgcttatcgacaattaaaagagggtggtaaattacttggtgccagcaaaatttcgctaagaggggatgatatcattgctttagctaaagagcttaacctgctctttactgctaaaaactcccctgaagagttagaccttaacattattgagtggatagcttattcaaatgatgaaggatacttgtctttaaaattcaccagaaccatagaaccatatatctctagccttattgggaaaaaaaataaattcacaacgcaattgttaacggcaagcttacgcttaagtagccagtattcatcttctctttatcaacttatcaggaagcattactctaattttaagaagaaaaattattttattatttccgttgatgagttaaaggaagagttaatagcttatacttttgataaagatggaaatattgagtacaaataccctgactttcctatttttaaaagggatgtgttaaataaagccattgctgaaattaaaaagaaaacagaaatatcgtttgttggcttcactgttcatgaaaaagaaggaagaaaaattagtaagctgaagttcgaatttgtcgttgatgaagatgaattttctggcgataaagatgatgaagctttttttatgaatttatctgaagctgatgcagcttttctcaaggtatttgatgaaaccgtacctcccaaaaaagctaaggggtga

SEQ ID NO: 1008 - DNA, 255 bp, Artificial Sequence
  source: /note="Description of Artificial Sequence: Synthetic polynucleotide"
  source: /note="Kis antitoxin"
cataccacccgactgaagagggttggcggctcagttatgctgaccgtcccaccggcactgctgaatgcgctgtctctgggcacagataatgaagttggcatggtcattgataatggccggctgattgttgagccgtacagacgcccgcaatattcactggctgagctactggcacagtgtgatccgaatgctgaaatatcagctgaagaacgagaatggctggatgcaccggcgactggtcaggaggaaatctga

SEQ ID NO: 1009 - DNA, 14 bp, Artificial Sequence
  source: /note="Description of Artificial Sequence: Synthetic oligonucleotide"
  source: /note="RBS (low copy)"
gctggaacaggtgg

SEQ ID NO: 1010 - DNA, 14 bp, Artificial Sequence
  source: /note="Description of Artificial Sequence: Synthetic oligonucleotide"
  source: /note="RBS (medium copy)"
tccggaagactagg

SEQ ID NO: 1011 - DNA, 60 bp, Artificial Sequence
  source: /note="Description of Artificial Sequence: Synthetic oligonucleotide"
  source: /note="SR36"
tagaactgatgcaaaaagtgctcgacgaaggcacacagatgtgtaggctggagctgcttc

SEQ ID NO: 1012 - DNA, 60 bp, Artificial Sequence
  source: /note="Description of Artificial Sequence: Synthetic oligonucleotide"
  source: /note="SR38"
gtttcgtaattagatagccaccggcgctttaatgcccggacatatgaatatcctccttag

SEQ ID NO: 1013 - DNA, 52 bp, Artificial Sequence
  source: /note="Description of Artificial Sequence: Synthetic oligonucleotide"
  source: /note="SR33"
caacacgtttcctgaggaaccatgaaacagtatttagaactgatgcaaaaag

SEQ ID NO: 1014 - DNA, 36 bp, Artificial Sequence
  source: /note="Description of Artificial Sequence: Synthetic oligonucleotide"
  source: /note="SR43"
atatcgtcgcagcccacagcaacacgtttcctgagg

SEQ ID NO: 1015 - DNA, 47 bp, Artificial Sequence
  source: /note="Description of Artificial Sequence: Synthetic oligonucleotide"
  source: /note="SR44"
aagaatttaacggagggcaaaaaaaaccgacgcacactggcgtcggc

SEQ ID NO: 1016 - DNA, 967 bp, Artificial Sequence
  source: /note="Description of Artificial Sequence: Synthetic polynucleotide"
  source: /note="Wild-type clbA"
caaatatcacataatcttaacatatcaataaacacagtaaagtttcatgtgaaaaacatcaaacataaaatacaagctcggaatacgaatcacgctatacacattgctaacaggaatgagattatctaaatgaggattgatatattaattggacatactagtttttttcatcaaaccagtagagataacttccttcactatctcaatgaggaagaaataaaacgctatgatcagtttcattttgtgagtgataaagaactctatattttaagccgtatcctgctcaaaacagcactaaaaagatatcaacctgatgtctcattacaatcatggcaatttagtacgtgcaaatatggcaaaccatttatagtttttcctcagttggcaaaaaagattttttttaacctttcccatactatagatacagtagccgttgctattagttctcactgcgagcttggtgtcgatattgaacaaataagagatttagacaactcttatctgaatatcagtcagcatttttttactccacaggaagctactaacatagtttcacttcctcgttatgaaggtcaattacttttttggaaaatgtggacgctcaaagaagcttacatcaaatatcgaggtaaaggcctatctttaggactggattgtattgaatttcatttaacaaataaaaaactaacttcaaaatatagaggttcacctgtttatttctctcaatggaaaatatgtaactcatttctcgcattagcctctccactcatcacccctaaaataactattgagctatttcctatgcagtcccaactttatcaccacgactatcagctaattcattcgtcaaatgggcagaattgaatcgccacggataatctagacacttctgagccgtcgataatattgattttcatattccgtcggtggtgtaagtatcccgcataatcgtgccattcacatttag

SEQ ID NO: 1017 - DNA, 424 bp, Artificial Sequence
  source: /note="Description of Artificial Sequence: Synthetic polynucleotide"
  source: /note="clbA knockout"
ggatggggggaaacatggataagttcaaagaaaaaaacccgttatctctgcgtgaaagacaagtattgcgcatgctggcacaaggtgatgagtactctcaaatatcacataatcttaacatatcaataaacacagtaaagtttcatgtgaaaaacatcaaacataaaatacaagctcggaatacgaatcacgctatacacattgctaacaggaatgagattatctaaatgaggattgatgtgtaggctggagctgcttcgaagttcctatactttctagagaataggaacttcggaataggaacttcggaataggaactaaggaggatattcatatgtcgtcaaatgggcagaattgaatcgccacggataatctagacacttctgagccgtcgataatattgattttcatattccgtcggtgg

SEQ ID NO: 1018 - DNA, 28 bp, Artificial Sequence
  source: /note="Description of Artificial Sequence: Synthetic oligonucleotide"
  source: /note="Master Sequence"
  modified_base (13)..(15): a, c, g or t
  modified_base (18)..(20): a, c, g or t
tctagagaaagannngannnactagatg

SEQ ID NO: 1019 - DNA, 28 bp, Artificial Sequence
  source: /note="Description of Artificial Sequence: Synthetic oligonucleotide"
  source: /note="BBa_J61100"
tctagagaaagaggggacaaactagatg

SEQ ID NO: 1020 - DNA, 28 bp, Artificial Sequence
  source: /note="Description of Artificial Sequence: Synthetic oligonucleotide"
  source: /note="BBa_J61101"
tctagagaaagacaggacccactagatg

SEQ ID NO: 1021 - DNA, 28 bp, Artificial Sequence
  source: /note="Description of Artificial Sequence: Synthetic oligonucleotide"
  source: /note="BBa_J61102"
tctagagaaagatccgatgtactagatg

SEQ ID NO: 1022 - DNA, 28 bp, Artificial Sequence
  source: /note="Description of Artificial Sequence: Synthetic oligonucleotide"
  source: /note="BBa_J61103"
tctagagaaagattagacaaactagatg

SEQ ID NO: 1023 - DNA, 28 bp, Artificial Sequence
  source: /note="Description of Artificial Sequence: Synthetic oligonucleotide"
  source: /note="BBa_J61104"
tctagagaaagaagggacagactagatg

SEQ ID NO: 1024 - DNA, 28 bp, Artificial Sequence
  source: /note="Description of Artificial Sequence: Synthetic oligonucleotide"
  source: /note="BBa_J61105"
tctagagaaagacatgacgtactagatg

SEQ ID NO: 1025 - DNA, 28 bp, Artificial Sequence
  source: /note="Description of Artificial Sequence: Synthetic oligonucleotide"
  source: /note="BBa_J61106"
tctagagaaagataggagacactagatg

SEQ ID NO: 1026 - DNA, 28 bp, Artificial Sequence
  source: /note="Description of Artificial Sequence: Synthetic oligonucleotide"
  source: /note="BBa_J61107"
tctagagaaagaagagactcactagatg

SEQ ID NO: 1027 - DNA, 28 bp, Artificial Sequence
  source: /note="Description of Artificial Sequence: Synthetic oligonucleotide"
  source: /note="BBa_J61108"
tctagagaaagacgagatatactagatg

SEQ ID NO: 1028 - DNA, 28 bp, Artificial Sequence
  source: /note="Description of Artificial Sequence: Synthetic oligonucleotide"
  source: /note="BBa_J61109"
tctagagaaagactggagacactagatg

SEQ ID NO: 1029 - DNA, 28 bp, Artificial Sequence
  source: /note="Description of Artificial Sequence: Synthetic oligonucleotide"
  source: /note="BBa_J61110"
tctagagaaagaggcgaattactagatg

SEQ ID NO: 1030 - DNA, 28 bp, Artificial Sequence
  source: /note="Description of Artificial Sequence: Synthetic oligonucleotide"
  source: /note="BBa_J61111"
tctagagaaagaggcgatacactagatg

SEQ ID NO: 1031 - DNA, 28 bp, Artificial Sequence
  source: /note="Description of Artificial Sequence: Synthetic oligonucleotide"
  source: /note="BBa_J61112"
tctagagaaagaggtgacatactagatg

SEQ ID NO: 1032 - DNA, 28 bp, Artificial Sequence
  source: /note="Description of Artificial Sequence: Synthetic oligonucleotide"
  source: /note="BBa_J61113"
tctagagaaagagtggaaaaactagatg

SEQ ID NO: 1033 - DNA, 28 bp, Artificial Sequence
  source: /note="Description of Artificial Sequence: Synthetic oligonucleotide"
  source: /note="BBa_J61114"
tctagagaaagatgagaagaactagatg

SEQ ID NO: 1034 - DNA, 28 bp, Artificial Sequence
  source: /note="Description of Artificial Sequence: Synthetic oligonucleotide"
  source: /note="BBa_J61115"
tctagagaaagaagggatacactagatg

SEQ ID NO: 1035 - DNA, 28 bp, Artificial Sequence
  source: /note="Description of Artificial Sequence: Synthetic oligonucleotide"
  source: /note="BBa_J61116"
tctagagaaagacatgaggcactagatg

SEQ ID NO: 1036 - DNA, 28 bp, Artificial Sequence
  source: /note="Description of Artificial Sequence: Synthetic oligonucleotide"
  source: /note="BBa_J61117"
tctagagaaagacatgagttactagatg

SEQ ID NO: 1037 - DNA, 28 bp, Artificial Sequence
  source: /note="Description of Artificial Sequence: Synthetic oligonucleotide"
  source: /note="BBa_J61118"
tctagagaaagagacgaatcactagatg

SEQ ID NO: 1038 - DNA, 28 bp, Artificial Sequence
  source: /note="Description of Artificial Sequence: Synthetic oligonucleotide"
  source: /note="BBa_J61119"
tctagagaaagatttgatatactagatg

SEQ ID NO: 1039 - DNA, 28 bp, Artificial Sequence
  source: /note="Description of Artificial Sequence: Synthetic oligonucleotide"
  source: /note="BBa_J61120"
tctagagaaagacgcgagaaactagatg

SEQ ID NO: 1040 - DNA, 28 bp, Artificial Sequence
  source: /note="Description of Artificial Sequence: Synthetic oligonucleotide"
  source: /note="BBa_J61121"
tctagagaaagagacgagtcactagatg

SEQ ID NO: 1041 - DNA, 28 bp, Artificial Sequence
  source: /note="Description of Artificial Sequence: Synthetic oligonucleotide"
  source: /note="BBa_J61122"
tctagagaaagagaggagccactagatg

SEQ ID NO: 1042 - DNA, 28 bp, Artificial Sequence
  source: /note="Description of Artificial Sequence: Synthetic oligonucleotide"
  source: /note="BBa_J61123"
tctagagaaagagatgactaactagatg

SEQ ID NO: 1043 - DNA, 28 bp, Artificial Sequence
  source: /note="Description of Artificial Sequence: Synthetic oligonucleotide"
  source: /note="BBa_J61124"
tctagagaaagagccgacatactagatg

SEQ ID NO: 1044 - DNA, 28 bp, Artificial Sequence
  source: /note="Description of Artificial Sequence: Synthetic oligonucleotide"
  source: /note="BBa_J61125"
tctagagaaagagccgagttactagatg

SEQ ID NO: 1045 - DNA, 28 bp, Artificial Sequence
  source: /note="Description of Artificial Sequence: Synthetic oligonucleotide"
  source: /note="BBa_J61126"
tctagagaaagaggtgactcactagatg

SEQ ID NO: 1046 - DNA, 28 bp, Artificial Sequence
  source: /note="Description of Artificial Sequence: Synthetic oligonucleotide"
  source: /note="BBa_J61127"
tctagagaaagagtggaactactagatg

SEQ ID NO: 1047 - DNA, 28 bp, Artificial Sequence
  source: /note="Description of Artificial Sequence: Synthetic oligonucleotide"
  source: /note="BBa_J61128"
tctagagaaagataggactcactagatg

SEQ ID NO: 1048 - DNA, 28 bp, Artificial Sequence
  source: /note="Description of Artificial Sequence: Synthetic oligonucleotide"
  source: /note="BBa_J61129"
tctagagaaagattggacgtactagatg

SEQ ID NO: 1049 - DNA, 28 bp, Artificial Sequence
  source: /note="Description of Artificial Sequence: Synthetic oligonucleotide"
  source: /note="BBa_J61130"
tctagagaaagaaacgacatactagatg

SEQ ID NO: 1050 - DNA, 28 bp, Artificial Sequence
  source: /note="Description of Artificial Sequence: Synthetic oligonucleotide"
  source: /note="BBa_J61131"
tctagagaaagaaccgaattactagatg

SEQ ID NO: 1051 - protein, 26 aa, Artificial Sequence
  source: /note="Description of Artificial Sequence: Synthetic peptide"
  source: /note="polypeptide linker"
SSADDAKKDAAKKDDAKKDDAKKDAS

SEQ ID NO: 1052 - protein, 15 aa, Artificial Sequence
  source: /note="Description of Artificial Sequence: Synthetic peptide"
  source: /note="polypeptide linker"
GGGGSGGGGSGGGGS

SEQ ID NO: 1053 - protein, 197 aa, Artificial Sequence
  source: /note="Description of Artificial Sequence: Synthetic polypeptide"
RNLPVATPDPGMFPCLHHSQNLLRAVSNMLQKARQTLEFYPCTSEEIDHEDITKDKTSTVEACLPLELTKNESCLNSRETSFITNGSCLASRKTSFMMALCLSSIYEDLKMYQVEFKTMNAKLLMDPKRQIFLDQNMLAVIDELMQALNFNSETVPQKSSLEEPDFYKTKIKLCILLHAFRIRAVTIDRVMSYLNAS

SEQ ID NO: 1054 - protein, 306 aa, Artificial Sequence
  source: /note="Description of Artificial Sequence: Synthetic polypeptide"
IWELKKDVYVVELDWYPDAPGEMVVLTCDTPEEDGITWTLDQSSEVLGSGKTLTIQVKEFGDAGQYTCHKGGEVLSHSLLLLHKKEDGIWSTDILKDQKEPKNKTFLRCEAKNYSGRFTCWWLTTISTDLTFSVKSSRGSSDPQGVTCGAATLSAERVRGDNKEYEYSVECQEDSACPAAEESLPIEVMVDAVHKLKYENYTSSFFIRDIIKPDPPKNLQLKPLKNSRQVEVSWEYPDTWSTPHSYFSLTFCVQVQGKSKREKKDRVFTDKTSATVICRKNASISVRAQDRYYSSSWSEWASVPCS

SEQ ID NO: 1055 - protein, 197 aa, Artificial Sequence; identical to SEQ ID NO: 1053
  source: /note="Description of Artificial Sequence: Synthetic polypeptide"

SEQ ID NO: 1056 - protein, 313 aa, Artificial Sequence
  source: /note="Description of Artificial Sequence: Synthetic polypeptide"
MWELEKDVYVVEVDWTPDAPGETVNLTCDTPEEDDITWTSDQRHGVIGSGKTLTITVKEFLDAGQYTCHKGGETLSHSHLLLHKKENGIWSTEILKNFKNKTFLKCEAPNYSGRFTCSWLVQRNMDLKFNIKSSSSSPDSRAVTCGMASLSAEKVTLDQRDYEKYSVSCQEDVTCPTAEETLPIELALEARQQNKYENYSTSFFIRDIIKPDPPKNLQMKPLKNSQVEVSWEYPDSWSTPHSYFSLKFFVRIQRKKEKMKETEEGCNQKGAFLVEKTSTEVQCKGGNVCVQAQDRYYNSSCSKWACVPCRVRS

SEQ ID NO: 1057 - protein, 114 aa, Artificial Sequence
  source: /note="Description of Artificial Sequence: Synthetic polypeptide"
NWVNVISDLKKIEDLIQSMHIDATLYTESDVHPSCKVTAMKCFLLELQVISLESGDASIHDTVENLIILANNSLSSNGNVTESGCKECEELEEKNIKEFLQSFVHIVQMFINTS

SEQ ID NO: 1058 - protein, 127 aa, Artificial Sequence [sequence omitted]

SEQ ID NO: 1059 - protein, 177 aa, Artificial Sequence
  source: /note="Description of Artificial Sequence: Synthetic polypeptide"
GPQREEFPRDLSLISPLAQAVRSSSRTPSDKPVAHVVANPQAEGQLQWLNRRANALLANGVELRDNQLVVPSEGLYLIYSQVLFKGQGCPSTHVLLTHTISRIAVSYQTKVNLLSAIKSPCQRETPEGAEAKPWYEPIYLGGVFQLEKGDRLSAEINRPDYLDFAESGQVYFGIIAL

SEQ ID NO: 1060 - protein, 138 aa, Artificial Sequence
  source: /note="Description of Artificial Sequence: Synthetic polypeptide"
QDPYVKEAENLKKYFNAGHSDVADNGTLFLGILKNWKEESDRKIMQSQIVSFYFKLFKNFKDDQSIQKSVETIKEDMNVKFFNSNKKKRDDFEKLTNYSVTDLNVQRKAIHELIQVMAELSPAAKTGKRKRSQMLFRG

SEQ ID NO: 1061 - protein, 73 aa, Artificial Sequence
  source: /note="Description of Artificial Sequence: Synthetic polypeptide"
VPLSRTVRCTCISISNQPVNPRSLEKLEIIPASQFCPRVEIIATMKKKGEKRCLNPESKAIKNLLKAVSKERS

SEQ ID NO: 1062 - protein, 125 aa, Artificial Sequence
  source: /note="Description of Artificial Sequence: Synthetic polypeptide"
MKKSGVLFLLGIILLVLIGVQGTPVVRKGRCSCISTNQGTIHLQSLKDLKQFAPSPSCEKIEIIATLKNGVQTCLNPDSADVKELIKKWEKQVSQKKKQKNGKKHQKKKVLKVRKSQRSRQKKTT

SEQ ID NO: 1063 - DNA, 594 bp, Artificial Sequence
  source: /note="Description of Artificial Sequence: Synthetic polynucleotide"
aggaacctgcctgtggcaacaccagaccctgggatgttcccttgcttacatcattcccagaacctgttgcgtgcggtgtctaacatgctgcagaaagccaggcagacgctggaattctacccatgcacttccgaagagatagatcatgaagacattacgaaagacaaaacctcaacggttgaagcatgcttacctctggaattgactaagaatgaatcgtgcttaaactcaagagagaccagtttcatcactaatggctcttgcttagcgtcgcgcaagaccagcttcatgatggcgctctgcctaagtagcatctacgaggacctcaaaatgtaccaagttgaatttaaaactatgaatgccaaacttctaatggacccaaaaagacagatatttttagatcagaatatgcttgcggttattgacgaactcatgcaggcattgaattttaattccgagacggtgccacaaaaaagttctttggaggagccggacttttacaagacaaaaatcaagctgtgcatacttcttcacgcattcagaatacgggccgttacgatcgatcgcgtcatgtcgtatcttaatgcgagctga

SEQ ID NO: 1064 - DNA, 924 bp, Artificial Sequence
  source: /note="Description of Artificial Sequence: Synthetic polynucleotide"
atctgggaactgaaaaaagatgtttatgtagttgaactggattggtacccggatgcacccggtgagatggtggttttgacctgcgacacgccggaagaagatggcataacgtggaccctggatcaaagctctgaagttctgggttcaggtaagacattgacgatccaagtaaaagaatttggcgacgcaggtcagtacacctgccacaaaggtggcgaagttctgtcgcactcactcctgctcctgcacaaaaaagaggatggcatctggagtactgatatcctaaaggatcaaaaagaacctaaaaacaaaacgttcttgcgctgtgaagcgaagaactatagtggtcgctttacgtgctggtggttgactaccatttccaccgatttgaccttttctgttaagagttcgcgcggctcgtcagatccgcagggcgttacttgcggtgcggcgacgctgtcagctgagagagttcgtggggacaacaaagagtacgaatatagtgtagaatgtcaagaggattcggcgtgcccggcagcagaggagtctctccccattgaagttatggtggacgcagtgcataaactgaaatatgagaattacacatcaagcttttttattcgcgatatcatcaaaccggatcctccaaaaaatctgcaactaaagcccctgaaaaattcgcgccaagttgaggtgagctgggaatatccggatacttggtcgacaccgcattcttatttctcactgaccttctgcgttcaggttcaaggtaaatcaaaacgagaaaaaaaggatcgcgtctttaccgacaaaacgtctgctactgtaatctgccgcaagaatgcgtcaatttctgtacgtgcgcaagatcgctactactctagtagttggtctgaatgggcttcagtgccatgctcctgatga

SEQ ID NO: 1065 - DNA, 594 bp, Artificial Sequence
  source: /note="Description of Artificial Sequence: Synthetic polynucleotide"
cgtaaccttccggtggccacgccagatccgggcatgttcccgtgcttacaccattcccagaatctgctgcgcgctgtgagtaatatgctgcagaaggcgagacaaactttggaattttacccgtgcacttcggaggagattgaccatgaggatatcacaaaagacaaaaccagtacagtggaagcctgcctgccccttgaactgactaaaaatgagagttgtttaaattcacgcgaaaccagcttcattactaacggaagctgcttagcatcgcggaaaaccagttttatgatggccctttgcctttcatctatttacgaggaccttaaaatgtatcaagttgaatttaagactatgaacgcgaaactgctaatggatcccaagcgacaaatctttcttgatcaaaatatgttggctgttattgatgaactgatgcaagccctgaattttaactcagaaaccgtacctcagaaatcgagtttagaagaacccgatttctacaaaactaaaatcaagttgtgtatccttttacatgccttccggattcgggccgtcactattgatcgcgtgatgtcgtacttgaatgcctcctaa

SEQ ID NO: 1066 - DNA, 942 bp, Artificial Sequence
  source: /note="Description of Artificial Sequence: Synthetic polynucleotide"
atgtgggaattggaaaaagacgtgtatgttgttgaagttgactggactccggacgcgcctggtgaaactgttaatctgacttgtgatacaccggaggaagatgatataacttggactagcgatcaacgacacggcgtaatcggctctggtaagactttgaccattactgtgaaggaattcttggatgcggggcaatatacgtgtcataaaggcggcgagacgctgtcacactctcacctgttgttacataaaaaagagaatggtatatggtctacggagatcttgaaaaactttaaaaacaaaacttttttgaagtgtgaggctccaaactattctggtcgctttacctgtagttggttggtgcaacgtaacatggatctcaaatttaacataaagtcgtcttcgtcttctcccgatagccgagcggttacctgtggcatggctagtttgtcggcggagaaggtgaccttggatcaacgtgattatgaaaaatatagcgtttcgtgccaagaggacgttacgtgccctaccgctgaagagactttgccgattgaattggcactggaagcacgacaacaaaataaatacgagaattactcaactagtttcttcatccgagatatcataaaaccggaccccccgaagaatctgcaaatgaaaccgcttaaaaattcacaggtagaggtttcgtgggagtacccggatagttggtctacgcctcattcgtattttagcctgaaatttttcgttcgaatacagcgaaaaaaagagaagatgaaagaaactgaagaagggtgtaaccaaaaaggtgcatttctggtggagaaaactagcaccgaggttcaatgcaaaggcggtaacgtgtgcgtacaagctcaagaccgttattataacagtagctgttctaaatgggcttgcgtgccctgccgcgtgagatcatga

SEQ ID NO: 1067 - DNA, 345 bp, Artificial Sequence
  source: /note="Description of Artificial Sequence: Synthetic polynucleotide"
aattgggttaatgttatatctgatttgaaaaaaatagaggatctgattcaatcaatgcacatagatgcgactctgtatactgagagcgatgtgcacccgagttgcaaagttactgctatgaaatgttttctgctggagctgcaagttatctctctggagagtggtgatgcgtctattcacgatactgttgagaatctgattattctggctaataactcgctgtcaagtaatgggaatgttacggaatctggctgtaaggagtgtgaagaattagaagaaaaaaatattaaagagtttctgcagagttttgtgcacattgttcagatgtttatcaatactagctga

SEQ ID NO: 1068 - DNA, 384 bp, Artificial Sequence
  source: /note="Description of Artificial Sequence: Synthetic polynucleotide"
gcaccggcccgcagcccatcaccgtcaactcaaccttgggaacatgtaaatgctattcaagaagctcgccgcctgttgaatttgagtcgcgatactgcagcagagatgaatgagactgtagaggtgatttcagaaatgtttgacctgcaggagccgacttgtttgcaaactcgcctggagctgtacaaacaaggcctgcgtggctcgctgactaaactgaaaggtcctctgacgatgatggcttctcattataaacaacactgcccgcctactccggagacgtcttgcgcgacccagataattacttttgaatcttttaaagagaatctgaaagactttctgctggttatcccgtttgattgttgggaaccggttcaagaataa

SEQ ID NO: 1069 - DNA, 534 bp, Artificial Sequence
  source: /note="Description of Artificial Sequence: Synthetic polynucleotide"
ggtccgcagagggaagaattcccgcgcgatttgagcctgatttcacctcttgctcaggctgtccgctcctcttcgcgtaccccctcggataaacctgtcgcgcacgtggttgcgaacccgcaagcggaagggcagctgcaatggttaaaccgccgggctaatgcactgctggctaatggagttgagttacgcgacaaccaacttgtcgttccttcggaagggctgtatctgatctattcacaggttctctttaaagggcagggttgcccatcaacccacgtgctcctgacacacacgatcagtcgtatcgcggtatcctatcagacgaaagttaacctcctgtcagcgattaaatcgccgtgtcagagagaaactccagagggtgcggaagctaaaccgtggtatgaacctatttatcttggtggagttttccagttggaaaaaggtgatagactgtcggcagagatcaatcgccctgattacctggatttcgctgagtcgggtcaggtttatttcggaattattgcactgtga

SEQ ID NO: 1070 - DNA, 417 bp, Artificial Sequence
  source: /note="Description of Artificial Sequence: Synthetic polynucleotide"
caggatccttacgttaaagaagcagagaatctgaaaaaatactttaatgcaggccacagcgatgtggcagataatggcacgttattcctgggcattctgaaaaattggaaagaagaatctgaccggaagatcatgcaatctcagatcgtatcattttatttcaagttgtttaaaaacttcaaggatgaccagtcgattcaaaaatcagtggaaacgatcaaagaagatatgaacgttaagttcttcaactcaaataaaaaaaaacgcgatgatttcgaaaaactgactaattattcggtaactgatttgaatgttcagcgcaaggcgattcatgaattgattcaggttatggcagaactgtcgccagcggcaaaaacgggtaaacgaaaacgttctcagatgttgtttcgtggttga

SEQ ID NO: 1071 - DNA, 222 bp, Artificial Sequence
  source: /note="Description of Artificial Sequence: Synthetic polynucleotide"
gtgcccctgagccgcaccgtgcgttgtacgtgtatctccatctcaaaccagccggtaaacccgcgtagtttagaaaaactggagattatcccagccagccagttttgcccgcgcgttgagattattgcgaccatgaagaaaaaaggggaaaaacgttgccttaatccagaaagtaaggctatcaaaaacctgttgaaagctgtctcgaaagagcgttcctaa

SEQ ID NO: 1072 - protein, 95 aa, Artificial Sequence
  source: /note="Description of Artificial Sequence: Synthetic polypeptide"
MMKRNILAVIVPALLVAGTANAVPLSRTVRCTCISISNQPVNPRSLEKLEIIPASQFCPRVEIIATMKKKGEKRCLNPESKAIKNLLKAVSKERS

SEQ ID NO: 1073 - protein, 94 aa, Artificial Sequence
  source: /note="Description of Artificial Sequence: Synthetic polypeptide"
MKQSTIALALLPLLFTPVTKAVPLSRTVRCTCISISNQPVNPRSLEKLEIIPASQFCPRVEIIATMKKKGEKRCLNPESKAIKNLLKAVSKERS

SEQ ID NO: 1074 - protein, 112 aa, Artificial Sequence
  source: /note="Description of Artificial Sequence: Synthetic polypeptide"
MNNNDLFQASRRRFLAQLGGLTVAGMLGPSLLTPRRATAVPLSRTVRCTCISISNQPVNPRSLEKLEIIPASQFCPRVEIIATMKKKGEKRCLNPESKAIKNLLKAVSKERS

SEQ ID NO: 1075 - protein, 125 aa, Artificial Sequence
  source: /note="Description of Artificial Sequence: Synthetic polypeptide"
MMKRNILAVIVPALLVAGTANATPVVRKGRCSCISTNQGTIHLQSLKDLKQFAPSPSCEKIEIIATLKNGVQTCLNPDSADVKELIKKWEKQVSQKKKQKNGKKHQKKKVLKVRKSQRSRQKKTT

SEQ ID NO: 1076 - protein, 124 aa, Artificial Sequence
  source: /note="Description of Artificial Sequence: Synthetic polypeptide"
MKQSTIALALLPLLFTPVTKATPVVRKGRCSCISTNQGTIHLQSLKDLKQFAPSPSCEKIEIIATLKNGVQTCLNPDSADVKELIKKWEKQVSQKKKQKNGKKHQKKKVLKVRKSQRSRQKKTT

SEQ ID NO: 1077 - protein, 142 aa, Artificial Sequence
  source: /note="Description of Artificial Sequence: Synthetic polypeptide"
MNNNDLFQASRRRFLAQLGGLTVAGMLGPSLLTPRRATATPVVRKGRCSCISTNQGTIHLQSLKDLKQFAPSPSCEKIEIIATLKNGVQTCLNPDSADVKELIKKWEKQVSQKKKQKNGKKHQKKKVLKVRKSQRSRQKKTT

SEQ ID NO: 1078 - protein, 126 aa, Artificial Sequence
  source: /note="Description of Artificial Sequence: Synthetic polypeptide"
MKQSTIALALLPLLFTPVTKATLVIRNARCSCISTSRGTIHYKSLKDLKQFAPSPNCNKTEIIATLKNGDQTCLDPDSANVKKLMKEWEKKISQKKKQKRGKKHQKNMKNRKPKTPQSRRRSRKTT

SEQ ID NO: 1079 - protein, 127 aa, Artificial Sequence
  source: /note="Description of Artificial Sequence: Synthetic polypeptide"
MMKRNILAVIVPALLVAGTANATLVIRNARCSCISTSRGTIHYKSLKDLKQFAPSPNCNKTEIIATLKNGDQTCLDPDSANVKKLMKEWEKKISQKKKQKRGKKHQKNMKNRKPKTPQSRRRSRKTT

SEQ ID NO: 1080 - protein, 144 aa, Artificial Sequence
  source: /note="Description of Artificial Sequence: Synthetic polypeptide"
MNNNDLFQASRRRFLAQLGGLTVAGMLGPSLLTPRRATATLVIRNARCSCISTSRGTIHYKSLKDLKQFAPSPNCNKTEIIATLKNGDQTCLDPDSANVKKLMKEWEKKISQKKKQKRGKKHQKNMKNRKPKTPQSRRRSRKTT

SEQ ID NO: 1081 - DNA, 285 bp, Artificial Sequence
  source: /note="Description of Artificial Sequence: Synthetic polynucleotide"
atgaagcagagcaccatcgcgcttgccctgctgccgttgcttttcacgcctgtcaccaaggctgtgcccctgagccgcaccgtgcgttgtacgtgtatctccatctcaaaccagccggtaaacccgcgtagtttagaaaaactggagattatcccagccagccagttttgcccgcgcgttgagattattgcgaccatgaagaaaaaaggggaaaaacgttgccttaatccagaaagtaaggctatcaaaaacctgttgaaagctgtctcgaaagagcgttcctaa

SEQ ID NO: 1082 - DNA, 297 bp, Artificial Sequence
  source: /note="Description of Artificial Sequence: Synthetic polynucleotide"
atgaagcagagcaccatcgcgcttgccctgctgccgttgcttttcacgcctgtcaccaaggctatcccactggctcgcacagtccgctgtaattgcatccacatcgatgacggtcctgtgcgtatgcgtgcaatcggtaaacttgaaattatccctgcctccttatcgtgtccccgcgtagagattatcgccacgatgaagaaaaacgatgaacagcgttgtcttaacccagagagcaaaactatcaaaaacctgatgaaggcttttagtcaaaagcgcagtaagcgcgcaccataa

SEQ ID NO: 1083 - DNA, 375 bp, Artificial Sequence
  source: /note="Description of Artificial Sequence: Synthetic polynucleotide"
atgaagcagagcaccatcgcgcttgccctgctgccgttgcttttcacgcctgtcaccaaggctacacccgtagtgcgtaaagggcgctgcagttgcatctcgactaaccaggggacaatccacctgcagtcgctgaaagatttgaagcagtttgcaccgagccctagttgtgaaaaaatcgagatcatcgctacattaaagaacggcgtccaaacatgtcttaaccccgactcagcagatgttaaagaacttattaagaaatgggagaagcaggtaagtcagaaaaagaaacagaaaaatggcaagaaacatcagaaaaagaaagtcttaaaggttcgtaaatcgcagcgttctcgtcaaaagaagacgacgtaa

SEQ ID NO: 1084 - DNA, 381 bp, Artificial Sequence
  source: /note="Description of Artificial Sequence: Synthetic polynucleotide"
atgaagcagagcaccatcgcgcttgccctgctgccgttgcttttcacgcctgtcaccaaggctacgctggtgatccgtaacgcccgctgttcatgcatcagcacttctcgtggaaccatccactataaatcattaaaggacttgaaacagtttgcaccttcaccaaattgtaacaagacggaaattattgctactctgaaaaacggagatcaaacttgcctggaccccgactctgcaaacgtgaagaagctgatgaaggaatgggaaaaaaaaatctctcaaaagaaaaagcaaaagcgcggtaagaaacatcagaagaacatgaagaatcgtaagccaaagacccctcagtcgcgccgtcgttctcgtaagacgacgtaa

SEQ ID NO: 1085 - DNA, 284 bp, Artificial Sequence
  source: /note="Description of Artificial Sequence: Synthetic polynucleotide"
atgaagcagagcaccatcgcgcttgccctgctgccgttgcttttcacgcctgtcaccaaggctgtgcccctgagccgcaccgtgcgttgtacgtgtatctccatctcaaaccagccggtaaacccgcgtagtttagaaaaactggagattatcccagccagccagttttgcccgcgcgttgagattattgcgaccatgaagaaaaaaggggaaaaacgttgccttaatccagaaagtaaggctatcaaaaacctgttgaaagctgtctcgaaagagcgttccta

SEQ ID NO: 1086 - DNA, 1204 bp, Artificial Sequence
  source: /note="Description of Artificial Sequence: Synthetic polynucleotide"
ccaggatacatagattaccacaactccgagcccttccaccttaagacccactttcacatttaagttgtttttctaatccgcatatgatcaattcaaggccgaataagaaggctggctctgcaccttggtgatcaaataattcgatagcttgtcgtaataatggcggcatactatcagtagtaggtgtttccctttcttctttagcgacttgatgctcttgatcttccaatacgcaacctaaagtaaaatgccccacagcgctgagtgcatataatgcattctctagtgaaaaaccttgttggcataaaaaggctaattgattttcgagagtttcatactgtttttctgtaggccgtgtacctaaatgtacttttgctccatcgcgatgacttagtaaagcacatctaaaacttttagcgttattacgtaaaaaatcttgccagctttccccttctaaagggcaaaagtgagtatggtgcctatctaacatctcaatggctaaggcgtcgagcaaagcccgcttattttttacatgccaatacaatgtaggctgctctacacctagcttctgggcgagtttacgggttgttaaaccttcgattccgacctcattaagcagctctaatgcgctgttaatcactttacttttatctaatctagacatcattaattcctaatttttgttgacactctatcattgatagagttattttaccactccctatcagtgatagagaaaagtgaaataagtttatcaaaataaaaggaggtaatatatgaagcagagcaccatcgcgcttgccctgctgccgttgcttttcacgcctgtcaccaaggctatcccactggctcgcacagtccgctgtaattgcatccacatcgatgacggtcctgtgcgtatgcgtgcaatcggtaaacttgaaattatccctgcctccttatcgtgtccccgcgtagagattatcgccacgatgaagaaaaacgatgaacagcgttgtcttaacccagagagcaaaactatcaaaaacctgatgaaggcttttagtcaaaagcgcagtaagcgcgcaccataaaacgattggtaaacccggtgaacgcatgagaaagcccccggaagatcaccttccgggggcttttttattgcgcggaccaaaacgaaaaaagacgctcgaaagcgtctcttttctggaatttggtaccgagg

SEQ ID NO: 1087 - DNA, 375 bp, Artificial Sequence; identical to SEQ ID NO: 1083
  source: /note="Description of Artificial Sequence: Synthetic polynucleotide"

SEQ ID NO: 1088 - DNA, 1288 bp, Artificial Sequence
  source: /note="Description of Artificial Sequence: Synthetic polynucleotide"
ccaggatacatagattaccacaactccgagcccttccaccttaagacccactttcacatttaagttgtttttctaatccgcatatgatcaattcaaggccgaataagaaggctggctctgcaccttggtgatcaaataattcgatagcttgtcgtaataatggcggcatactatcagtagtaggtgtttccctttcttctttagcgacttgatgctcttgatcttccaatacgcaacctaaagtaaaatgccccacagcgctgagtgcatataatgcattctctagtgaaaaaccttgttggcataaaaaggctaattgattttcgagagtttcatactgtttttctgtaggccgtgtacctaaatgtacttttgctccatcgcgatgacttagtaaagcacatctaaaacttttagcgttattacgtaaaaaatcttgccagctttccccttctaaagggcaaaagtgagtatggtgcctatctaacatctcaatggctaaggcgtcgagcaaagcccgcttattttttacatgccaatacaatgtaggctgctctacacctagcttctgggcgagtttacgggttgttaaaccttcgattccgacctcattaagcagctctaatgcgctgttaatcactttacttttatctaatctagacatcattaattcctaatttttgttgacactctatcattgatagagttattttaccactccctatcagtgatagagaaaagtgaaataagtttatcaaaataaaaggaggtaatatatgaagcagagcaccatcgcgcttgccctgctgccgttgcttttcacgcctgtcaccaaggctacgctggtgatccgtaacgcccgctgttcatgcatcagcacttctcgtggaaccatccactataaatcattaaaggacttgaaacagtttgcaccttcaccaaattgtaacaagacggaaattattgctactctgaaaaacggagatcaaacttgcctggaccccgactctgcaaacgtgaagaagctgatgaaggaatgggaaaaaaaaatctctcaaaagaaaaagcaaaagcgcggtaagaaacatcagaagaacatgaagaatcgtaagccaaagacccctcagtcgcgccgtcgttctcgtaagacgacgtaaaacgattggtaaacccggtgaacgcatgagaaagcccccggaagatcaccttccgggggcttttttattgcgcggaccaaaacgaaaaaagacgctcgaaagcgtctcttttctggaatttggtaccgagg

SEQ ID NO: 1089 - DNA, 858 bp, Artificial Sequence
  source: /note="Description of Artificial Sequence: Synthetic polynucleotide"
aaacaatcgaccatcgcattggcgctgcttcctctattgttcacaccggtgacaaaggcagtcgactataaggatgacgacgacaagcaattgggcggtggccaccgtcgtttggacaaggtggaggaggaagtcaacttgcatgaagattttgtatttatcaagaaattaaagcgttgtaacaagggtgaagggagcttgagtttacttaactgtgaagaaatgcgccgccaattcgaggacttggttaaggacattacccttaacaaggaagaaaagaaagagaacagcttcgaaatgcagcgtggcgatgaagacccccagatcgcggcacatgtcgtttccgaggcaaattcgaatgctgcttcagtcttacaatgggcgaaaaagggctactacacgatgaagtcaaacttagtgatgcttgaaaatggcaagcaattaaccgtgaagcgcgaaggattgtattatgtctacacccaagtaacattttgctccaatcgcgaaccgtcgtcgcagcgccctttcatcgttggtttgtggttgaagccgagctccggttccgagcgtattcttttgaaagccgcaaacacccacagcagctcgcagctgtgtgaacagcagagcgtccacctgggcggcgtatttgaattgcaagcgggagcgtcagttttcgttaatgtgactgaggcttctcaagttatccatcgtgtcggtttctccagcttcggcttactgaagttaaagggcgagctcaattcgaagcttgaaggtaagcctatccctaaccctctcctcggcctcgattctacggatccgaattcgagctccgtcgaccatcaccatcaccaccactga

SEQ ID NO: 1090 - DNA, 791 bp, Artificial Sequence
  source: /note="Description of Artificial Sequence: Synthetic polynucleotide"
tgactagtaaacaatcgaccatcgcattggcgctgcttcctctattgttcacaccggtgacaaaggcagtcgactataaggatgacgacgacaagcaattgggcggtggcatgcaacgtggcgatgaggacccgcaaattgccgcgcatgttgtgtccgaagcgaactccaatgccgcatccgtcctgcaatgggctaagaaaggctattacacgatgaaatcaaacctggttatgcttgagaacggaaagcagcttacagtcaagcgtgagggcctgtattacgtctacacccaagttaccttttgctctaaccgtgagcccagcagccaacgcccttttattgtaggcctgtggttaaagccctcgtcgggttctgaacgcattcttctgaaagctgcgaatacgcactctagtagccagctgtgtgagcaacaatctgtccatcttggtggagtttttgagttacaagctggagcatctgtgttcgtgaatgtaacggaagcatctcaagttatccaccgtgtaggcttctcatcttttggtttattaaaattaaagggcgagctcaattcgaagcttgaaggtaagcctatccctaaccctctcctcggcctcgattctacggatccgaattcgagctccgtcgaccatcaccatcaccaccactgagcatgctaatcagccgtggaattcggtctcaggaggatcagttctggaccagcgagctgtgctgcgactcgtggcgtaatcatggtcatagctgtttcctgtgtgaaattgttatccgct

SEQ ID NO: 1091 - protein, 288 aa, Artificial Sequence
  source: /note="Description of Artificial Sequence: Synthetic polypeptide"
MTSKQSTIALALLPLLFTPVTKAVDYKDDDDKQLGGGHRRLDKVEEEVNLHEDFVFIKKLKRCNKGEGSLSLLNCEEMRRQFEDLVKDITLNKEEKKENSFEMQRGDEDPQIAAHVVSEANSNAASVLQWAKKGYYTMKSNLVMLENGKQLTVKREGLYYVYTQVTFCSNREPSSQRPFIVGLWLKPSSGSERILLKAANTHSSSQLCEQQSVHLGGVFELQAGASVFVNVTEASQVIHRVGFSSFGLLKLKGELNSKLEGKPIPNPLLGLDSTDPNSSSVDHHHHHH

SEQ ID NO: 1092 - protein, 223 aa, Artificial Sequence
  source: /note="Description of Artificial Sequence: Synthetic polypeptide"
MTSKQSTIALALLPLLFTPVTKAVDYKDDDDKQLGGGMQRGDEDPQIAAHVVSEANSNAASVLQWAKKGYYTMKSNLVMLENGKQLTVKREGLYYVYTQVTFCSNREPSSQRPFIVGLWLKPSSGSERILLKAANTHSSSQLCEQQSVHLGGVFELQAGASVFVNVTEASQVIHRVGFSSFGLLKLKGELNSKLEGKPIPNPLLGLDSTDPNSSSVDHHHHHH

SEQ ID NO: 1093 - protein, 215 aa, Artificial Sequence
  source: /note="Description of Artificial Sequence: Synthetic polypeptide"
HRRLDKIEDERNLHEDFVFMKTIQRCNTGERSLSLLNCEEIKSQFEGFVKDIMLNKEETKKENSFEMQKGDQNPQIAAHVISEASSKTTSVLQWAEKGYYTMSNNLVTLENGKQLTVKRQGLYYIYAQVTFCSNREASSQAPFIASLCLKSPGRFERILLRAANTHSSAKPCGQQSIHLGGVFELQPGASVFVNVTDPSQVSHGTGFTSFGLLKL

SEQ ID NO: 1094 - DNA, 1251 bp, Artificial Sequence
  source: /note="Description of Artificial Sequence: Synthetic polynucleotide"
atgactagtaaacaatcgaccatcgcattggcgctgcttcctctattgttcacaccggtgacaaaggcagtcgactataaggatgacgacgacaagcaattgggcggtggcaaggaactgaaagtcacccagcctgagaagtctgtctcagtagcggcaggtgacagcacggtgcttaactgcacgcttacttcactgctgccggtaggtcccattaaatggtatcgtggcgtgggccaaagtcgtttgttaatctactcctttacgggtgagcactttccgcgcgtaactaatgtaagcgacgcaacaaaacgtaacaacatggatttcagcattcgcatctcaaacgtcactcccgaggatgctgggacttactactgcgtaaaatttcagaaaggcccctcagagcccgatacagaaatccaatcaggaggcggcacagaagtctacgttctggcaaaaccctctccccctgaagtctccggtccagcagatcgtggcattcctgaccaaaaagtaaatttcacgtgcaaatcgcacgggtttagcccacgcaacatcacactgaagtggtttaaagatggtcaggaacttcatcaccttgagactaccgtgaacccgtccggtaaaaacgtttcctacaatatctcgtccactgtgcgtgttgtattgaatagcatggacgttcacagcaaggtgatctgtgaagtcgctcacattacccttgaccgttcaccattgcgtggtatcgcgaacctgagcaatttcatccgtgtcagcccgacggttaaggttactcagcagtccccaacatcgatgaaccaggtaaatctgacgtgtcgtgcagaacgtttttaccctgaagacctgcagttgatttggctggagaacgggaacgtctcgcgcaatgacacacccaaaaatctgacaaagaatactgacggtacgtacaattatacatcactgtttcttgtgaactcctccgcccatcgcgaggacgtagtctttacatgtcaagtcaagcacgatcagcagcccgcgatcacccgtaatcacacagttctgggcctggctcactcatccgatcagggatcaatgcaaacatttccgggaaacaatgcaacccacaactggaataagggcgagctcaattcgaagcttgaaggtaagcctatccctaaccctctcctcggcctcgattctacggatccgaattcgagctccgtcgaccatcaccatcaccaccactga

SEQ ID NO: 1095 - DNA, 564 bp, Artificial Sequence
  source: /note="Description of Artificial Sequence: Synthetic polynucleotide"
atgactagtaaacaatcgaccatcgcattggcgctgcttcctctattgttcacaccggtgacaaaggcagtcgactataaggatgacgacgacaagcaattgggtggtagcgaagaagaactgcagattatccaaccggacaaatctgttctggtggctgcgggtgaaacggctactttgcgctgcacaatcacctcgctgtttccagtcggaccaatccaatggttccgtggtgcgggaccgggtcgcgtgttgatctacaatcagcgtcaaggccctttcccccgtgttactactgtctccgatacaacaaagcgcaacaacatggacttttccatccgtatcgggaatatcacaccggccgacgcgggaacctattattgcatcaagtttcgcaagggatctccagacgatgttgaatttaagagcggggctggaactgagctgtccgtgcgtgcaaaaccttcgggcagcggcgagctcggtggcagtggtaagcctatccctaaccctctcctcggcctcgattctacgggatccggtcatcatcaccatcaccattga

SEQ ID NO: 1096 - DNA, 357 bp, Artificial Sequence
  source: /note="Description of Artificial Sequence: Synthetic polynucleotide"
gaagaagaactgcagattatccaaccggacaaatctgttctggtggctgcgggtgaaacggctactttgcgctgcacaatcacctcgctgtttccagtcggaccaatccaatggttccgtggtgcgggaccgggtcgcgtgttgatctacaatcagcgtcaaggccctttcccccgtgttactactgtctccgatacaacaaagcgcaacaacatggacttttccatccgtatcgggaatatcacaccggccgacgcgggaacctattattgcatcaagtttcgcaagggatctccagacgatgttgaatttaagagcggggctggaactgagctgtccgtgcgtgcaaaaccttcg

SEQ ID NO: 1097 - DNA, 945 bp, Artificial Sequence
  source: /note="Description of Artificial Sequence: Synthetic polynucleotide"
atgactagtaaacaatcgaccatcgcattggcgctgcttcctctattgttcacaccggtgacaaaggcagtcgactataaggatgacgacgacaagcaattgggtggtagcgaggaggaagtgcaaatcattcaacccgacaaaagcgttagtgtcgcggcgggtgagtccgccatcctgcattgcactatcacatccctgtttcccgtaggtcccattcaatggtttcgtggagccggtccggcgcgtgttcttatctacaatcaacgccagggacccttcccgcgtgttacaacgatcagtgaaactacccgtcgtgaaaacatggactttagcatttcgatctccaacattacacccgctgacgcagggacgtactactgcatcaagtttcgtaaaggatctccagacactgagtttaagtctggcgcagggacggagttgtccgtgcgtgcgaaaccttctggcggaggagggtcggggggcggtggttctgaagaggaagttcagattatccaaccagataaatcagtgtccgtggcggcgggagagtcagctatccttcactgtacaatcacatcgttattccctgtagggccaattcagtggttccgtggggcaggacccgcacgtgtccttatctataatcagcgtcaggggcccttcccacgtgttacgacaatttcagagactactcgccgcgagaacatggacttcagtattagcatctcgaacattaccccggcggacgcgggaacttattactgtatcaagtttcgtaaaggctcgccggacaccgagttcaaatccggggcaggcactgagttgagcgtgcgtgcgaaaccatcgggcagcggcgagctcggtggcagtggtaagcctatccctaaccctctcctcggcctcgattctacgggatccggtcatcatcaccatcaccattga

SEQ ID NO: 1098 - DNA, 1224 bp, Artificial Sequence
  source: /note="Description of Artificial Sequence: Synthetic polynucleotide"
atgactagtaaacaatcgaccatcgcattggcgctgcttcctctattgttcacaccggtgacaaaggcacaattgggtggtagcgaggaggagttacaaattatccaaccagataagtctgtcttggtcgcagccggagaaacggcgacgttacgctgcacaatcacctcactgttcccggtcggtccgattcagtggttccgtggagctggtccgggccgtgtcttaatttacaatcaacgtcaaggaccttttccacgcgtaacaactgtttctgacacaaccaaacgtaacaatatggacttttctattcgtattggcaacattacgccagccgatgcaggtacatactactgtatcaaattccgtaaaggtagtcctgatgacgttgagtttaaaagcggcgcagggacggagctttcagtgcgtgcaaagcccagtgctagcgcggcggcgccgccatgcccgccatgccctgcgcccgagttcttgggtgggccttcagtgttcctttttcccccgaaaccaaaagataccctgatgatttcgcgcacccctgaagttacttgtgtggttgttgacgtctcacaagaggacccagaggtacaattcaactggtatgtggacggagtagaggtgcataacgccaagactaagccccgtgaagagcagttcaattctacataccgtgtagtttcggttttaacggtcttacaccaagattggttgaacggaaaggaatataagtgcaaggtgtccaataagggactgccaagcagtatcgaaaaaacaatctcaaaagcaaagggacaaccgcgtgagccccaggtttacactctgccaccgtcgcaagaggagatgacgaagaatcaggtgtcgttaacctgtttggtcaaaggcttttatccaagcgatatcgcagtggaatgggaatcaaatgggcagcctgaaaataactataagacaaccccgcctgtacttgattctgatggatctttttttctttatagtcgcttaaccgtggataaatcccgttggcaggaaggtaatgtcttctcatgctcggttatgcacgaggcccttcataaccattacactcagaagagcctttctctgagtccggggaaaggcagcggcgagctcggtggcagtggtaagcctatccctaaccctctcctcggcctcgattctacgggatccggtcatcatcaccatcaccattga

SEQ ID NO: 1099 - DNA, 1128 bp, Artificial Sequence
  source: /note="Description of Artificial Sequence: Synthetic polynucleotide"
atgactagtaaacaatcgaccatcgcattggcgctgcttcctctattgttcacaccggtgacaaaggcacaattgggtggtagcgaggaggagttacaaattatccaaccagataagtctgtcttggtcgcagccggagaaacggcgacgttacgctgcacaatcacctcactgttcccggtcggtccgattcagtggttccgtggagctggtccgggccgtgtcttaatttacaatcaacgtcaaggaccttttccacgcgtaacaactgtttctgacacaaccaaacgtaacaatatggacttttctattcgtattggcaacattacgccagccgatgcaggtacatactactgtatcaaattccgtaaaggtagtcctgatgacgttgagtttaaaagcggcgcagggacggagctttcagtgcgtgcaaagcccagtgctagcgcggcggcgccgccatgcccgccatgccctgcgcccgagttcttgggtgggccttcagtgttcctttttcccccgaaaccaaaagataccctgatgatttcgcgcacccctgaagttacttgtgtggttgttgacgtctcacaagaggacccagaggtacaattcaactggtatgtggacggagtagaggtgcataacgccaagactaagccccgtgaagagcagttcaattctacataccgtgtagtttcggttttaacggtcttacaccaagattggttgaacggaaaggaatataagtgcaaggtgtccaataagggactgccaagcagtatcgaaaaaacaatctcaaaagcaaagggacaaccgcgtgagccccaggtttacactctgccaccgtcgcaagaggagatgacgaagaatcaggtgtcgttaacctgtttggtcaaaggcttttatccaagcgatatcgcagtggaatgggaatcaaatgggcagcctgaaaataactataagacaaccccgcctgtacttgattctgatggatctttttttctttatagtcgcttaaccgtggataaatcccgttggcaggaaggtaatgtcttctcatgctcggttatgcacgaggcccttcataaccattacactcagaagagcctttctctgagtccggggaaa

SEQ ID NO: 1100 - DNA, 1128 bp, Artificial Sequence; identical to SEQ ID NO: 1099
  source: /note="Description of Artificial Sequence: Synthetic polynucleotide"

SEQ ID NO: 1101 - DNA, 1191 bp, Artificial Sequence
  source: /note="Description of Artificial Sequence: Synthetic polynucleotide"
atgactagtaaacaatcgaccatcgcattggcgctgcttcctctattgttcacaccggtgacaaaggcacaattgggtggtagcgaagaagaggtgcagatcatccaacccgataaatcggtatctgtcgcagctggggagtcggcgattttgcattgcaccattacatctttgttccctgttgggcctattcaatggtttcgcggggcaggtccggcccgcgtattgatttataaccagcgtcaaggaccgttcccccgtgttacaactatttcggaaacaacacgtcgtgaaaatatggatttctcgatctctatctctaacattactcccgccgatgcagggacttattattgcattaaatttcgcaaaggaagccccgacacggagtttaagagtggagcgggcacggaattatcggtgcgcgcgaaacccagtgctagcgcggcggcgccgccatgcccgccatgccctgcgcccgagttcttgggtgggccttcagtgttcctttttcccccgaaaccaaaagataccctgatgatttcgcgcacccctgaagttacttgtgtggttgttgacgtctcacaagaggacccagaggtacaattcaactggtatgtggacggagtagaggtgcataacgccaagactaagccccgtgaagagcagttcaattctacataccgtgtagtttcggttttaacggtcttacaccaagattggttgaacggaaaggaatataagtgcaaggtgtccaataagggactgccaagcagtatcgaaaaaacaatctcaaaagcaaagggacaaccgcgtgagccccaggtttacactctgccaccgtcgcaagaggagatgacgaagaatcaggtgtcgttaacctgtttggtcaaaggcttttatccaagcgatatcgcagtggaatgggaatcaaatgggcagcctgaaaataactataagacaaccccgcctgtacttgattctgatggatctttttttctttatagtcgcttaaccgtggataaatcccgttggcaggaaggtaatgtcttctcatgctcggttatgcacgaggcccttcataaccattacactcagaagagcctttctctgagtccggggaaaggcagcggcgagctcggtggcagtggtaagcctatccctaaccctctcctcggcctcgattctacg

SEQ ID NO: 1102 - DNA, 1041 bp, Artificial Sequence
  source: /note="Description of Artificial Sequence: Synthetic polynucleotide"
gaagaagaggtgcagatcatccaacccgataaatcggtatctgtcgcagctggggagtcggcgattttgcattgcaccattacatctttgttccctgttgggcctattcaatggtttcgcggggcaggtccggcccgcgtattgatttataaccagcgtcaaggaccgttcccccgtgttacaactatttcggaaacaacacgtcgtgaaaatatggatttctcgatctctatctctaacattactcccgccgatgcagggacttattattgcattaaatttcgcaaaggaagccccgacacggagtttaagagtggagcgggcacggaattatcggtgcgcgcgaaacccagtgctagcgcggcggcgccgccatgcccgccatgccctgcgcccgagttcttgggtgggccttcagtgttcctttttcccccgaaaccaaaagataccctgatgatttcgcgcacccctgaagttacttgtgtggttgttgacgtctcacaagaggacccagaggtacaattcaactggtatgtggacggagtagaggtgcataacgccaagactaagccccgtgaagagcagttcaattctacataccgtgtagtttcggttttaacggtcttacaccaagattggttgaacggaaaggaatataagtgcaaggtgtccaataagggactgccaagcagtatcgaaaaaacaatctcaaaagcaaagggacaaccgcgtgagccccaggtttacactctgccaccgtcgcaagaggagatgacgaagaatcaggtgtcgttaacctgtttggtcaaaggcttttatccaagcgatatcgcagtggaatgggaatcaaatgggcagcctgaaaataactataagacaaccccgcctgtacttgattctgatggatctttttttctttatagtcgcttaaccgtggataaatcccgttggcaggaaggtaatgtcttctcatgctcggttatgcacgaggcccttcataaccattacactcagaagagcctttctctgagtccggggaaa

SEQ ID NO: 1103 - DNA, 681 bp, Homo sapiens
gcggcggcgccgccatgcccgccatgccctgcgcccgagttcttgggtgggccttcagtgttcctttttcccccgaaaccaaaagataccctgatgatttcgcgcacccctgaagttacttgtgtggttgttgacgtctcacaagaggacccagaggtacaattcaactggtatgtggacggagtagaggtgcataacgccaagactaagccccgtgaagagcagttcaattctacataccgtgtagtttcggttttaacggtcttacaccaagattggttgaacggaaaggaatataagtgcaaggtgtccaataagggactgccaagcagtatcgaaaaaacaatctcaaaagcaaagggacaaccgcgtgagccccaggtttacactctgccaccgtcgcaagaggagatgacgaagaatcaggtgtcgttaacctgtttggtcaaaggcttttatccaagcgatatcgcagtggaatgggaatcaaatgggcagcctgaaaataactataagacaaccccgcctgtacttgattctgatggatctttttttctttatagtcgcttaaccgtggataaatcccgttggcaggaaggtaatgtcttctcatgctcggttatgcacgaggcccttcataaccattacactcagaagagcctttctctgagtccggggaaa

SEQ ID NO: 1104 - DNA, 929 bp, Artificial Sequence
  source: /note="Description of Artificial Sequence: Synthetic polynucleotide"
atgactagtaaacaatcgaccatcgcattggcgctgcttcctctattgttcacaccggtgacaaaggcacaattgggtggtagccaggttaagttgcttcagtccggtgccgcattagtgaagcctggagcaagtgtcaagatgtcgtgtcaggcaagcgggtacagcttcaccgattattgggtgacgtgggttaaacaatcccacggacaatcattggaatggatcggggaaatctaccccagtaacactgtgacaaattttaacgacaattttaaagggaaggcaacccttacggtggataagtctacttccacagcgtatatggagctgagtcgcctgacttctgaggactctgccatctattactgtacacgtatcgggaacagtgggtatcgtgtagggtggttcatctactgggggcaaggtacccttgtgacagttttatccgggggtggcgggtcgggaggggggggatcaggcggtggagggtcggatacagttctgacccagtctccggcattggcggtgtcaccgggggagcgtgtcacgatcagttgtaaggcatcggaatccgtgtcgagccacatgcactggtaccagcagaaaccggggcagcagcctaaactgttgatttacaaggcatcaaatttagcctctggtgtacccgctcgttttagtggcagtggctcgggaacggacttcactttaacgattgaccctgttgaggcagacgataccgccacttacttctgccagcagggttggaacggcccattcacttttggggccgggacccgtctggaactgaagcgcgcggacgccgctggcagcggcgagctcggtggcagtggtaagcctatccctaaccctctcctcggcctcgattctacgggatccggtcatcaccaccatcaccatcaccattg

SEQ ID NO: 1105 - protein, 415 aa, Artificial Sequence
  source: /note="Description of Artificial Sequence: Synthetic polypeptide"
MTSKQSTIALALLPLLFTPVTKAVDYKDDDDKQLGGGKELKVTQPEKSVSVAAGDSTVLNCTLTSLLPVGPIKWYRGVGQSRLLIYSFTGEHFPRVTNVSDATKRNNMDFSIRISNVTPEDAGTYYCVKFQKGPSEPDTEIQSGGGTEVYVLAKPSPPEVSGPADRGIPDQKVNFTCKSHGFSPRNITLKWFKDGQELHHLETTVNPSGKNVSYNISSTVRVVLNSMDVHSKVICEVAHITLDRSPLRGIANLSNFIRVSPTVKVTQQSPTSMNQVNLTCRAERFYPEDLQLIWLENGNVSRNDTPKNLTKNTDGTYNYTSLFLVNSSAHREDVVFTCQVKHDQQPAITRNHTVLGLAHSSDQGSMQTFPGNNATHNWNKGELNSKEGKPIPNPLLGLDSTDPNSSSVDHHHHHH

SEQ ID NO: 1106 - protein, 187 aa, Artificial Sequence
  source: /note="Description of Artificial Sequence: Synthetic polypeptide"
MTSKQSTIALALLPLLFTPVTKAVDYKDDDDKQLGGSEEELQIIQPDKSVLVAAGETATLRCTITSLFPVGPIQWFRGAGPGRVLIYNQRQGPFPRVTTVSDTTKRNNMDFSIRIGNITPADAGTYYCIKFRKGSPDDVEFKSGAGTELSVRAKPSGSGELGGSGKPIPNPLLGLDSTGSGHHHHHH

SEQ ID NO: 1107 - protein, 119 aa, Artificial Sequence
  source: /note="Description of Artificial Sequence: Synthetic polypeptide"
EEELQIIQPDKSVLVAAGETATLRCTITSLFPVGPIQWFRGAGPGRVLIYNQRQGPFPRVTTVSDTTKRNNMDFSIRIGNITPADAGTYYCIKFRKGSPDDVEFKSGAGTELSVRAKPS

SEQ ID NO: 1108 - protein, 314 aa, Artificial Sequence
  source: /note="Description of Artificial Sequence: Synthetic polypeptide"
MTSKQSTIALALLPLLFTPVTKAVDYKDDDDKQLGGSEEEVQIIQPDKSVSVAAGESAILHCTITSLFPVGPIQWFRGAGPARVLIYNQRQGPFPRVTTISETTRRENMDFSISISNITPADAGTYYCIKFRKGSPDTEFKSGAGTELSVRAKPSGGGGSGGGGSEEEVQIIQPDKSVSVAAGESAILHCTITSLFPVGPIQWFRGAGPARVLIYNQRQGPFPRVTTISETTRRENMDFSISISNITPADAGTYYCIKFRKGSPDTEFKSGAGTELSVRAKPSGSGELGGSGKPIPNPLLGLDSTGSGHHHHHH

SEQ ID NO: 1109 - protein, 246 aa, Artificial Sequence
  source: /note="Description of Artificial Sequence: Synthetic polypeptide"
EEEVQIIQPDKSVSVAAGESAILHCTITSLFPVGPIQWFRGAGPARVLIYNQRQGPFPRVTTISETTRRENMDFSISISNITPADAGTYYCIKFRKGSPDTEFKSGAGTELSVRAKPSGGGGSGGGGSEEEVQIIQPDKSVSVAAGESAILHCTITSLFPVGPIQWFRGAGPARVLIYNQRQGPFPRVTTISETTRRENMDFSISISNITPADAGTYYCIKFRKGSPDTEFKSGAGTELSVRAKPS

SEQ ID NO: 1110 - protein, 416 aa, Artificial Sequence
  source: /note="Description of Artificial Sequence: Synthetic polypeptide"
MTSKQSTIALALLPLLFTPVTKAVDYKDDDDKQLGGSEEELQIIQPDKSVLVAAGETATLRCTITSLFPVGPIQWFRGAGPGRVLIYNQRQGPFPRVTTVSDTTKRNNMDFSIRIGNITPADAGTYYCIKFRKGSPDDVEFKSGAGTELSVRAKPSASAAAPPCPPCPAPEFLGGPSVFLFPPKPKDTLMISRTPEVTCVVVDVSQEDPEVQFNWYVDGVEVHNAKTKPREEQFNSTYRVVSVLTVLHQDWLNGKEYKCKVSNKGLPSSIEKTISKAKGQPREPQVYTLPPSQEEMTKNQVSLTCLVKGFYPSDIAVEWESNGQPENNYKTTPPVLDSDGSFFLYSRLTVDKSRWQEGNVFSCSVMHEALHNHYTQKSLSLSPGKGSGELGGSGKPIPNPLLGLDSTGSGHHHHHH

SEQ ID NO: 1111 - protein, 385 aa, Artificial Sequence
  source: /note="Description of Artificial Sequence: Synthetic polypeptide"
MTSKQSTIALALLPLLFTPVTKAVDYKDDDDKQLGGSEEELQIIQPDKSVLVAAGETATLRCTITSLFPVGPIQWFRGAGPGRVLIYNQRQGPFPRVTTVSDTTKRNNMDFSIRIGNITPADAGTYYCIKFRKGSPDDVEFKSGAGTELSVRAKPSASAAAPPCPPCPAPEFLGGPSVFLFPPKPKDTLMISRTPEVTCVVVDVSQEDPEVQFNWYVDGVEVHNAKTKPREEQFNSTYRVVSVLTVLHQDWLNGKEYKCKVSNKGLPSSIEKTISKAKGQPREPQVYTLPPSQEEMTKNQVSLTCLVKGFYPSDIAVEWESNGQPENNYKTTPPVLDSDGSFFLYSRLTVDKSRWQEGNVFSCSVMHEALHNHYTQKSLSLSPGK

SEQ ID NO: 1112 - protein, 348 aa, Artificial Sequence
  source: /note="Description of Artificial Sequence: Synthetic polypeptide"
EEELQIIQPDKSVLVAAGETATLRCTITSLFPVGPIQWFRGAGPGRVLIYNQRQGPFPRVTTVSDTTKRNNMDFSIRIGNITPADAGTYYCIKFRKGSPDDVEFKSGAGTELSVRAKPSASAAAPPCPPCPAPEFLGGPSVFLFPPKPKDTLMISRTPEVTCVVVDVSQEDPEVQFNWYVDGVEVHNAKTKPREEQFNSTYRVVSVLTVLHQDWLNGKEYKCKVSNKGLPSSIEKTISKAKGQPREPQVYTLPPSQEEMTKNQVSLTCLVKGFYPSDIAVEWESNGQPENNYKTTPPVLDSDGSFFLYSRLTVDKSRWQEGNVFSCSVMHEALHNHYTQKSLSLSPGK

SEQ ID NO: 1113 - protein, 407 aa, Artificial Sequence
  source: /note="Description of Artificial Sequence: Synthetic polypeptide"
MTSKQSTIALALLPLLFTPVTKAQLGGSEEEVQIIQPDKSVSVAAGESAILHCTITSLFPVGPIQWFRGAGPARVLIYNQRQGPFPRVTTISETTRRENMDFSISISNITPADAGTYYCIKFRKGSPDTEFKSGAGTELSVRAKPSASAAAPPCPPCPAPEFLGGPSVFLFPPKPKDTLMISRTPEVTCVVVDVSQEDPEVQFNWYVDGVEVHNAKTKPREEQFNSTYRVVSVLTVLHQDWLNGKEYKCKVSNKGLPSSIEKTISKAKGQPREPQVYTLPPSQEEMTKNQVSLTCLVKGFYPSDIAVEWESNGQPENNYKTTPPVLDSDGSFFLYSRLTVDKSRWQEGNVFSCSVMHEALHNHYTQKSLSLSPGKGSGELGGSGGKPIPNPLLGLDSTGSGHHHHHH

SEQ ID NO: 1114 - protein, 375 aa, Artificial Sequence
  source: /note="Description of Artificial Sequence: Synthetic polypeptide"
MTSKQSTIALALLPLLFTPVTKAQLGGSEEEVQIIQPDKSVSVAAGESAILHCTITSLFPVGPIQWFRGAGPARVLIYNQRQGPFPRVTTISETTRRENMDFSISISNITPADAGTYYCIKFRKGSPDTEFKSGAGTELSVRAKPSASAAAPPCPPCPAPEFLGGPSVFLFPPKPKDTLMISRTPEVTCVVVDVSQEDPEVQFNWYVDGVEVHNAKTKPREEQFNSTYRVVSVLTVLHQDWLNGKEYKCKVSNKGLPSSIEKTISKAKGQPREPQVYTLPPSQEEMTKNQVSLTCLVKGFYPSDIAVEWESNGQPENNYKTTPPVLDSDGSFFLYSRLTVDKSRWQEGNVFSCSVMHEALHNHYTQKSLSLSPGK

SEQ ID NO: 1115 - protein, 347 aa, Artificial Sequence
  source: /note="Description of Artificial Sequence: Synthetic polypeptide"
EEEVQIIQPDKSVSVAAGESAILHCTITSLFPVGPIQWFRGAGPARVLIYNQRQGPFPRVTTISETTRRENMDFSISISNITPADAGTYYCIKFRKGSPDTEFKSGAGTELSVRAKPSASAAAPPCPPCPAPEFLGGPSVFLFPPKPKDTLMISRTPEVTCVVVDVSQEDPEVQFNWYVDGVEVHNAKTKPREEQFNSTYRVVSVLTVLHQDWLNGKEYKCKVSNKGLPSSIEKTISKAKGQPREPQVYTLPPSQEEMTKNQVSLTCLVKGFYPSDIAVEWESNGQPENNYKTTPPVLDSDGSFFLYSRLTVDKSRWQEGNVFSCSVMHEALHNHYTQKSLSLSPGK

SEQ ID NO: 1116 - protein, 118 aa, Artificial Sequence
  source: /note="Description of Artificial Sequence: Synthetic polypeptide"
EEEVQIIQPDKSVSVAAGESAILHCTITSLFPVGPIQWFRGAGPARVLIYNQRQGPFPRVTTISETTRRENMDFSISISNITPADAGTYYCIKFRKGSPDTEFKSGAGTELSVRAKPS

SEQ ID NO: 1117 - protein, 227 aa, Artificial Sequence
  source: /note="Description of Artificial Sequence: Synthetic polypeptide"
AAAPPCPPCPAPEFLGGPSVFLFPPKPKDTLMISRTPEVTCVVVDVSQEDPEVQFNWYVDGVEVHNAKTKPREEQFNSTYRVVSVLTVLHQDWLNGKEYKCKVSNKGLPSSIEKTISKAKGQPREPQVYTLPPSQEEMTKNQVSLTCLVKGFYPSDIAVEWESNGQPENNYKTTPPVLDSDGSFFLYSRLTVDKSRWQEGNVFSCSVMHEALHNHYTQKSLSLSPGK

SEQ ID NO: 1118 - protein, 307 aa, Artificial Sequence
  source: /note="Description of Artificial Sequence: Synthetic polypeptide"
MTSKQSTIALALLPLLFTPVTKAQLGGSQVKLLQSGAALVKPGASVKMSCQASGYSFTDYWVTWVKQSHGQSLEWIGEIYPSNTVTNFNDNFKGKATLTVDKSTSTAYMELSRLTSEDSAIYYCTRIGNSGYRVGWFIYWGQGTLVTVLSGGGGSGGGGSGGGGSDTVLTQSPALAVSPGERVTISCKASESVSSHMHWYQQKPGQQPKLLIYKASNLASGVPARFSGSGSGTDFTLTIDPVEADDTATYFCQQGWNGPFTFGAGTRLELKRADAAGSGELGGSGKPIPNPLLGLDSTGSGHHHHHH

SEQ ID NO: 1119 - protein, 21 aa, Homo sapiens
IVVGVVCTLLVALLMAALYLV

SEQ ID NO: 1120 - protein, 110 aa, Homo sapiens
RIRQKKAQGSTSSTRLHEPEKNAREITQDTNDITYADLNLPKGKKPAPQAAEPNNHTEYASIQTSPQPASEDTLTYADLDMVHLNRTPKQPAPKPEPSFSEYASVQVPRK

SEQ ID NO: 1121 - protein, 16 aa, Artificial Sequence
  source: /note="Description of Artificial Sequence: Synthetic peptide"
SGGGGSGGGGSGGGGS

SEQ ID NO: 1122 - DNA, 1452 bp, Artificial Sequence
  source: /note="Description of Artificial Sequence: Synthetic polynucleotide"
atgactagtaaacaatcgaccatcgcattggcgctgcttcctctattgttcacaccggtgacaaaggcagtcgactataaggatgacgacgacaagcaattgggcggtggctttcgtgggccattgttacccaaccgtccattcaccactgtctggaacgccaatacacaatggtgtttggagcgtcatggagtcgatgtagatgtatccgtgtttgatgtcgtggcgaacccgggacagacatttcgtggaccggacatgaccatcttttattcgtcacaacttggcacctacccttattacactcccacgggtgagcctgtctttggtggacttcctcaaaatgcttctttgattgcgcacttggcgcgtactttccaagatatcctggctgccatccctgccccggatttttcgggactggctgtaattgattgggaggcatggcgccctcgttgggccttcaactgggatacaaaggacatttaccgccaacgcagccgcgccttggttcaggcccaacaccccgactggccggcgccccaggtggaagcagttgcacaggaccagttccaaggagccgctcgcgcttggatggcgggtactttacagttggggcgcgctttgcgtcctcgcggcttgtggggattctatggttttccagactgctataactacgacttcttgtctcccaactacaccggacagtgtccctctgggattcgtgctcagaatgaccaacttggatggctgtggggccaaagtcgtgcgctgtatccgagcatttatatgccagccgttctggaaggaacaggcaagtctcagatgtacgttcaacatcgtgtagcggaagcctttcgtgtagccgtggcggcaggtgacccaaatttgccggtcttaccttacgtacagattttttatgacactacaaatcacttccttccactggatgagttagaacattcattgggggagtcagcagctcagggcgcggctggggtggtgttgtgggtgagctgggaaaacacgcgtacgaaagagtcatgccaggctatcaaggaatacatggatacaactcttggtccgtttattttgaatgtgacttctggggcgcttttgtgttcccaggctctttgctcaggtcatgggcgttgcgttcgccgtacctcgcatccgaaagcgcttctgcttctgaacccagcgtcattcagcattcaactgacacctggagggggtcctttatcactgcgcggggctttatctttggaagaccaagctcagatggcggtcgagttcaagtgtcgctgctacccaggttggcaggccccgtggtgcgagcgtaaaagtatgtggaagggcgagctcaattcgaagcttgaaggtaagcctatccctaaccctctcctcggcctcgattctacgcgtaccggtcatcatcaccatcaccattga

SEQ ID NO: 1123 - DNA, 1353 bp, Artificial Sequence
  source: /note="Description of Artificial Sequence: Synthetic polynucleotide"
atgactagtaaacaatcgaccatcgcattggcgctgcttcctctattgttcacaccggtgacaaaggcagtcgactataaggatgacgacgacaagcaattgggcggtggctttcgtgggccattgttacccaaccgtccattcaccactgtctggaacgccaatacacaatggtgtttggagcgtcatggagtcgatgtagatgtatccgtgtttgatgtcgtggcgaacccgggacagacatttcgtggaccggacatgaccatcttttattcgtcacaacttggcacctacccttattacactcccacgggtgagcctgtctttggtggacttcctcaaaatgcttctttgattgcgcacttggcgcgtactttccaagatatcctggctgccatccctgccccggatttttcgggactggctgtaattgattgggaggcatggcgccctcgttgggccttcaactgggatacaaaggacatttaccgccaacgcagccgcgccttggttcaggcccaacaccccgactggccggcgccccaggtggaagcagttgcacaggaccagttccaaggagccgctcgcgcttggatggcgggtactttacagttggggcgcgctttgcgtcctcgcggcttgtggggattctatggttttccagactgctataactacgacttcttgtctcccaactacaccggacagtgtccctctgggattcgtgctcagaatgaccaacttggatggctgtggggccaaagtcgtgcgctgtatccgagcatttatatgccagccgttctggaaggaacaggcaagtctcagatgtacgttcaacatcgtgtagcggaagcctttcgtgtagccgtggcggcaggtgacccaaatttgccggtcttaccttacgtacagattttttatgacactacaaatcacttccttccactggatgagttagaacattcattgggggagtcagcagctcagggcgcggctggggtggtgttgtgggtgagctgggaaaacacgcgtacgaaagagtcatgccaggctatcaaggaatacatggatacaactcttggtccgtttattttgaatgtgacttctggggcgcttttgtgttcccaggctctttgctcaggtcatgggcgttgcgttcgccgtacctcgcatccgaaagcgcttctgcttctgaacccagcgtcattcagcattcaactgacacctggagggggtcctttatcactgcgcggggctttatctttggaagaccaagctcagatggcggtcgagttcaagtgtcgctgctacccaggttggcaggccccgtggtgcgagcgtaaaagtatgtgg

SEQ ID NO: 1124 - DNA, 1440 bp, Artificial Sequence
  source: /note="Description of Artificial Sequence: Synthetic polynucleotide"
atgactagtaaacaatcgaccatcgcattggcgctgcttcctctattgttcacaccggtgacaaaggcagtcgactataaggatgacgacgacaagcaattgggcggtggctctgttgttagcaaccgtccctttatcactgtgtggaacggtgacacacattggtgtttaaccgagtacggggtcgatgtggacgtttcggtctttgacgtcgtggctaataaagagcaatctttccaaggctctaatatgaccatcttctatcgtgaagagcttggcacatacccatactacaccccaactggcgagccagtctttggggggcttccgcaaaatgcctctttggtgactcatctggcgcataccttccaagatatcaaagcggcgatgcccgaaccagatttttccgggttagcggtaatcgactgggaggcatggcgtcctcgctgggcttttaactgggatagtaaagatatttatcgccaacgttctatggaacttgtgcaagcagaacatcctgattggcctgagaccctggtggaggcagctgctaaaaatcagttccaggaggcagcagaagcgtggatggccggaacgctgcagttggggcaagtgttgcgcccgcgcggactttggggctattatggattccccgactgttataacaatgacttcctttcgttaaattacaccggccaatgtcccgtgttcgttcgtgatcagaatgatcagttgggatggttgtggaaccagtcatacgccctttatccatccatctatttacccgccgctttaatgggcacggagaaatctcagatgtatgttcgccaccgtgttcaggaagcattgcgtgttgctattgtttcccgtgacccccacgttccggtcatgccatacgtccaaatcttttacgaaatgaccgactatttgttaccgttagaagagcttgaacacagtttgggggagtcagctgcacaaggtgtagcgggagcagtgctttggttgagttcagacaaaacgtctactaaagaatcatgtcaagcaattaaagcatacatggattccaccttgggtccgtttatcgtgaacgtcacatcggcggcattgttatgctcagaagccctttgctcggggcatggccgctgtgttcgtcatccaagctaccccgaggctctgttgacattgaatcctgcaagtttttcgatcgaactgacacatgacgggcgcccacccagtcttaaaggcaccctttcattgaaagatcgtgctcagatggcgatgaaattccgctgtcgttgctatcgtggttggcgcggcaagtggtgcgataaacgtggtatgaagggcgagctcaattcgaagcttgaaggtaagcctatccctaaccctctcctcggcctcgattctacgcgtaccggtcatcatcaccatcaccattga

SEQ ID NO: 1125 - DNA, 1580 bp, Artificial Sequence
  source: /note="Description of Artificial Sequence: Synthetic polynucleotide"
atgaaacaatcgaccatcgcattggcgctgcttcctctattgttcacaccggtgacaaaggcacaattgggcggtggcatgaaagagattgctgttaccatcgacgataaaaacgtgattgcttcagtcagtgaaagctttcacggcgtcgctttcgacgcttccctgttttctccgaaaggcctgtggagttttgttgacattacgtcacccaagctgtttaaactgcttgagggcctgtctccaggttactttcgcgttggcgggacattcgcgaactggttattcttcgacttagacgagaacaacaagtggaaggattactgggcttttaaagacaaaactcctgagacagccacaattacgcgccgttggttgtttcgcaagcaaaacaatttaaagaaggagacgttcgatgatcttgtcaagctgactaaaggatcaaagatgcgtcttttgtttgacctgaatgcagaagttcgcacagggtacgaaattggcaaaaagatgaccagcacttgggattcatctgaagctgaaaagctgttcaagtactgtgttagcaagggttacggagacaatattgactgggagcttggtaacgaacccgaccacacaagcgcacataacttaactgagaagcaggtgggtgaagatttcaaggcgctgcataaagttttggagaagtatccaaccttaaataaaggatcgttggtagggcctgacgtagggtggatgggggtatcatacgttaaaggtctggccgatggtgcaggtgaccatgtgacagcttttacgttacatcaatactacttcgatggtaacacgtcggatgtgtcaacttacttggacgctacctactttaaaaagttacaacagctgttcgataaggtaaaagacgtcttgaaaaattccccacataaagacaaacccctttggcttggcgaaactagctcgggttacaacagcggaacgaaagatgtgtctgaccgttatgtgtcagggttcttgacacttgataaattgggccttagcgccgctaacaacgtgaaggtcgtcattcgccagactatctataatggttactatggcttgttagacaaaaacacccttgagcctaacccggactattggttgatgcatgtacataactcgctggtagggaacactgtgttcaaggttgacgtgtctgatcctactaacaaggcccgtgtttacgcgcagtgtaccaaaactaatagcaaacatacacaatctcgctactacaaaggttcccttaccatttttgctttgaatgtcggcgacgaggatgtgaccttaaagattgaccaatattctgggaagaaaatttattcatatattctgactccagaggggggtcaactgaccagccaaaaagtacttttgaatggcaaggagttgaaactggtgagcgatcagcttccagagctgaacgcggatgagtccaaaacatcatttacattatctcctaagacgttcgggtttttcgtcgtgagtgacgctaatgtagaagcatgtaagaaaggatccggtcatcaccaccatcaccatcaccatta

SEQ ID NO: 1126 - DNA, 1545 bp, Artificial Sequence
  source: /note="Description of Artificial Sequence: Synthetic polynucleotide"
atgaaacaatcgaccatcgcattggcgctgcttcctctattgttcacaccggtgacaaaggcacaattgggcggtggcatgaaagagattgctgttaccatcgacgataaaaacgtgattgcttcagtcagtgaaagctttcacggcgtcgctttcgacgcttccctgttttctccgaaaggcctgtggagttttgttgacattacgtcacccaagctgtttaaactgcttgagggcctgtctccaggttactttcgcgttggcgggacattcgcgaactggttattcttcgacttagacgagaacaacaagtggaaggattactgggcttttaaagacaaaactcctgagacagccacaattacgcgccgttggttgtttcgcaagcaaaacaatttaaagaaggagacgttcgatgatcttgtcaagctgactaaaggatcaaagatgcgtcttttgtttgacctgaatgcagaagttcgcacagggtacgaaattggcaaaaagatgaccagcacttgggattcatctgaagctgaaaagctgttcaagtactgtgttagcaagggttacggagacaatattgactgggagcttggtaacgaacccgaccacacaagcgcacataacttaactgagaagcaggtgggtgaagatttcaaggcgctgcataaagttttggagaagtatccaaccttaaataaaggatcgttggtagggcctgacgtagggtggatgggggtatcatacgttaaaggtctggccgatggtgcaggtgaccatgtgacagcttttacgttacatcaatactacttcgatggtaacacgtcggatgtgtcaacttacttggacgctacctactttaaaaagttacaacagctgttcgataaggtaaaagacgtcttgaaaaattccccacataaagacaaacccctttggcttggcgaaactagctcgggttacaacagcggaacgaaagatgtgtctgaccgttatgtgtcagggttcttgacacttgataaattgggccttagcgccgctaacaacgtgaaggtcgtcattcgccagactatctataatggttactatggcttgttagacaaaaacacccttgagcctaacccggactattggttgatgcatgtacataactcgctggtagggaacactgtgttcaaggttgacgtgtctgatcctactaacaaggcccgtgtttacgcgcagtgtaccaaaactaatagcaaacatacacaatctcgctactacaaaggttcccttaccatttttgctttgaatgtcggcgacgaggatgtgaccttaaagattgaccaatattctgggaagaaaatttattcatatattctgactccagaggggggtcaactgaccagccaaaaagtacttttgaatggcaaggagttgaaactggtgagcgatcagcttccagagctgaacgcggatgagtccaaaacatcatttacattatctcctaagacgttcgggtttttcgtcgtgagtgacgctaatgtagaagcatgtaagaaa

SEQ ID NO: 1127 - protein, 483 aa, Artificial Sequence
  source: /note="Description of Artificial Sequence: Synthetic polypeptide"
MTSKQSTIALALLPLLFTPVTKAVDYKDDDDKQLGGGFRGPLLPNRPFTTVWNANTQWCLERHGVDVDVSVFDVVANPGQTFRGPDMTIFYSSQLGTYPYYTPTGEPVFGGLPQNASLIAHLARTFQDILAAIPAPDFSGLAVIDWEAWRPRWAFNWDTKDIYRQRSRALVQAQHPDWPAPQVEAVAQDQFQGAARAWMAGTLQLGRALRPRGLWGFYGFPDCYNYDFLSPNYTGQCPSGIRAQNDQLGWLWGQSRALYPSIYMPAVLEGTGKSQMYVQHRVAEAFRVAVAAGDPNLPVLPYVQIFYDTTNHFLPLDELEHSLGESAAQGAAGVVLWVSWENTRTKESCQAIKEYMDTTLGPFILNVTSGALLCSQALCSGHGRCVRRTSHPKALLLLNPASFSIQLTPGGGPLSLRGALSLEDQAQMAVEFKCRCYPGWQAPWCERKSMWKGELNSKLEGKPIPNPLLGLDSTRTGHHHHHH

SEQ ID NO: 1128 - protein, 414 aa, Artificial Sequence
  source: /note="Description of Artificial Sequence: Synthetic polypeptide"
FRGPLLPNRPFTTVWNANTQWCLERHGVDVDVSVFDVVANPGQTFRGPDMTIFYSSQLGTYPYYTPTGEPVFGGLPQNASLIAHLARTFQDILAAIPAPDFSGLAVIDWEAWRPRWAFNWDTKDIYRQRSRALVQAQHPDWPAPQVEAVAQDQFQGAARAWMAGTLQLGRALRPRGLWGFYGFPDCYNYDFLSPNYTGQCPSGIRAQNDQLGWLWGQSRALYPSIYMPAVLEGTGKSQMYVQHRVAEAFRVAVAAGDPNLPVLPYVQIFYDTTNHFLPLDELEHSLGESAAQGAAGVVLWVSWENTRTKESCQAIKEYMDTTLGPFILNVTSGALLCSQALCSGHGRCVRRTSHPKALLLLNPASFSIQLTPGGGPLSLRGALSLEDQAQMAVEFKCRCYPGWQAPWCERKSMW

SEQ ID NO: 1129 - protein, 451 aa, Artificial Sequence
  source: /note="Description of Artificial Sequence: Synthetic polypeptide"
MTSKQSTIALALLPLLFTPVTKAVDYKDDDDKQLGGGFRGPLLPNRPFTTVWNANTQWCLERHGVDVDVSVFDVVANPGQTFRGPDMTIFYSSQLGTYPYYTPTGEPVFGGLPQNASLIAHLARTFQDILAAIPAPDFSGLAVIDWEAWRPRWAFNWDTKDIYRQRSRALVQAQHPDWPAPQVEAVAQDQFQGAARAWMAGTLQLGRALRPRGLWGFYGFPDCYNYDFLSPNYTGQCPSGIRAQNDQLGWLWGQSRALYPSIYMPAVLEGTGKSQMYVQHRVAEAFRVAVAAGDPNLPVLPYVQIFYDTTNHFLPLDELEHSLGESAAQGAAGVVLWVSWENTRTKESCQAIKEYMDTTLGPFILNVTSGALLCSQALCSGHGRCVRRTSHPKALLLLNPASFSIQLTPGGGPLSLRGALSLEDQAQMAVEFKCRCYPGWQAPWCERKSMW

SEQ ID NO: 1130 - protein, 499 aa, Artificial Sequence
  source: /note="Description of Artificial Sequence: Synthetic polypeptide"
MTSKQSTIALALLPLLFTPVTKAKQSTIALALLPLLFTPVTKAVDYKDDDDKDLGGGSVVSNRPFITVWNGDTHWCLTEYGVDVDVSVFDVVANKEQSFQGSNMTIFYREELGTYPYYTPTGEPVFGGLPQNASLVTHLAHTFQDIKAAMPEPDFSGLAVIDWEAWRPRWAFNWDSKDIYRQRSMELVQAEHPDWPETLVEAAAKNQFQEAAEAWMAGTLQLGQVLRPRGLWGYYGFPDCYNNDFLSLNYTGQCPVFVRDQNDQLGWLWNQSYALYPSIYLPAALMGTEKSQMYVRHRVQEALRVAIVSRDPHVPVMPYVQIFYEMTDYLLPLEELEHSLGESAAQGVAGAVLWLSSDKTSTKESCQAIKAYMDSTLGPFIVNVTSAALLCSEALCSGHGRCVRHPSYPEALLTLNPASFSIELTHDGRPPSLKGTLSLKDRAQMAMKFRCRCYRGWRGKWCDKRGMKGELNSKLEGKPIPNPLLGLDSTRTGHHHHHH

SEQ ID NO: 1131 - protein, 489 aa, Hirudo nipponia
MKEIAVTIDDKNVIASVSESFHGVAFDASLFSPKGLWSFVDITSPKLFKLLEGLSPGYFRVGGTFANWLFFDLDENNKWKDYWAFKDKTPETATITRRWLFRKQNNLKKETFDDLVKLTKGSKMRLLFDLNAEVRTGYEIGKKMTSTWDSSEAEKLFKYCVSKGYGDNIDWELGNEPDHTSAHNLTEKQVGEDFKALHKVLEKYPTLNKGSLVGPDVGWMGVSYVKGLADGAGDHVTAFTLHQYYFDGNTSDVSTYLDATYFKKLQQLFDKVKDVLKNSPHKDKPLWLGETSSGYNSGTKDVSDRYVSGFLTLDKLGLSAANNVKVVIRQTIYNGYYGLLDKNTLEPNPDYWLMHVHNSLVGNTVFKVDVSDPTNKARVYAQCTKTNSKHTQSRYYKGSLTIFALNVGDEDVTLKIDQYSGKKIYSYILTPEGGQLTSQKVLLNGKELKLVSDQLPELNADESKTSFTLSPKTFGFFVVSDANVEACKK

SEQ ID NO: 1132 - protein, 78 aa, Homo sapiens
ITCPPPMSVEHADIWVKSYSLYSRERYICNSGFKRKAGTSSLTECVLNKATNVAHWTTPSLKCIRDPALVHQRPAPPS

SEQ ID NO: 1133 - protein, 248 aa, Artificial Sequence
  source: /note="Description of Artificial Sequence: Synthetic polypeptide"
MFKSTLAAMAAVFALSALSPAAMADYKDDDDKIEGRITCPPPMSVEHADIWVKSYSLYSRERYICNSGFKRKAGTSSLTECVLNKATNVAHWTTPSLKCIRDPALVHQRPAPPSSGGSGGGGSGGGSGGGGSLQNWVNVISDLKKIEDLIQSMHIDATLYTESDVHPSCKVTAMKCFLLELQVISLESGDASIHDTVENLIILANDSLSSNGNVTESGCKECEELEEKNIKEFLQSFVHIVQMFINTS

SEQ ID NO: 1134 - protein, 212 aa, Artificial Sequence
  source: /note="Description of Artificial Sequence: Synthetic polypeptide"
ITCPPPMSVEHADIWVKSYSLYSRERYICNSGFKRKAGTSSLTECVLNKATNVAHWTTPSLKCIRDPALVHQRPAPPSSGGSGGGGSGGGSGGGGSLQNWVNVISDLKKIEDLIQSMHIDATLYTESDVHPSCKVTAMKCFLLELQVISLESGDASIHDTVENLIILANDSLSSNGNVTESGCKECEELEEKNIKEFLQSFVHIVQMFINTS

SEQ ID NO: 1135 - protein, 24 aa, Artificial Sequence
  source: /note="Description of Artificial Sequence: Synthetic peptide"
MFKSTLAAMAAVFALSALSPAAMA

SEQ ID NO: 1136 - protein, 114 aa, Homo sapiens
NWVNVISDLKKIEDLIQSMHIDATLYTESDVHPSCKVTAMKCFLLELQVISLESGDASIHDTVENLIILANDSLSSNGNVTESGCKECEELEEKNIKEFLQSFVHIVQMFINTS

SEQ ID NO: 1137 - protein, 20 aa, Artificial Sequence
  source: /note="Description of Artificial Sequence: Synthetic peptide"
SGGSGGGGSGGGSGGGGSLQ

SEQ ID NO: 1138 - DNA, 234 bp, Artificial Sequence
  source: /note="Description of Artificial Sequence: Synthetic polynucleotide"
atcacctgcccgcctccaatgtctgttgagcacgcagatatttgggtaaaatcttactctttatattcccgtgaacgctatatctgtaatagtggcttcaagcgcaaggcaggcacatcctcactgacggagtgtgttttaaacaaagcaacaaacgtcgctcactggacgacgcccagcctgaagtgcatccgcgacccggcattggtccatcaacgtccagcccctccctca

SEQ ID NO: 1139 - DNA, 747 bp, Artificial Sequence
  source: /note="Description of Artificial Sequence: Synthetic polynucleotide"
atgtttaagtctacacttgcagccatggccgcagtcttcgcactgtcagccttgagtcctgctgcaatggcagattataaagacgatgacgataagatcgaaggacgtatcacctgcccgcctccaatgtctgttgagcacgcagatatttgggtaaaatcttactctttatattcccgtgaacgctatatctgtaatagtggcttcaagcgcaaggcaggcacatcctcactgacggagtgtgttttaaacaaagcaacaaacgtcgctcactggacgacgcccagcctgaagtgcatccgcgacccggcattggtccatcaacgtccagcccctccctcatccggagggagcggcggcgggggtagtggaggcgggtcaggcggcgggggctcacttcagaactgggtgaatgtcatctcggacttaaagaagattgaagacttgattcagagcatgcatatcgacgcgactttatacaccgagtctgacgtacacccaagttgcaaggtcaccgccatgaagtgcttcttgcttgagttacaagtcatcagtttggaatctggagacgctagtattcacgatacggtggaaaacctgatcatccttgcaaatgactctctttcatccaatggtaatgttactgagtcggggtgcaaagaatgtgaagaacttgaggagaagaacattaaggaatttcttcagtcattcgtgcatatcgtacagatgttcatcaacacctcttaa

SEQ ID NO: 1140 - DNA, 639 bp, Artificial Sequence
  source: /note="Description of Artificial Sequence: Synthetic polynucleotide"
atcacctgcccgcctccaatgtctgttgagcacgcagatatttgggtaaaatcttactctttatattcccgtgaacgctatatctgtaatagtggcttcaagcgcaaggcaggcacatcctcactgacggagtgtgttttaaacaaagcaacaaacgtcgctcactggacgacgcccagcctgaagtgcatccgcgacccggcattggtccatcaacgtccagcccctccctcatccggagggagcggcggcgggggtagtggaggcgggtcaggcggcgggggctcacttcagaactgggtgaatgtcatctcggacttaaagaagattgaagacttgattcagagcatgcatatcgacgcgactttatacaccgagtctgacgtacacccaagttgcaaggtcaccgccatgaagtgcttcttgcttgagttacaagtcatcagtttggaatctggagacgctagtattcacgatacggtggaaaacctgatcatccttgcaaatgactctctttcatccaatggtaatgttactgagtcggggtgcaaagaatgtgaagaacttgaggagaagaacattaaggaatttcttcagtcattcgtgcatatcgtacagatgttcatcaacacctcttaa

SEQ ID NO: 1141 - DNA, 72 bp, Artificial Sequence
  source: /note="Description of Artificial Sequence: Synthetic oligonucleotide"
atgtttaagtctacacttgcagccatggccgcagtcttcgcactgtcagccttgagtcctgctgcaatggca

SEQ ID NO: 1142 - DNA, 63 bp, Artificial Sequence
  source: /note="Description of Artificial Sequence: Synthetic oligonucleotide"
atgaagcaggcgcttcgcgttgcgtttgggttccttatcctgtgggcatccgtacttcacgcc

SEQ ID NO: 1143 - DNA, 54 bp, Artificial Sequence
  source: /note="Description of Artificial Sequence: Synthetic oligonucleotide"
atgcgcgtactgttattccttctgttgtctctttttatgttgcccgctttcagt

SEQ ID NO: 1144 - DNA, 63 bp, Artificial Sequence
  source: /note="Description of Artificial Sequence: Synthetic oligonucleotide"
atgaagaagactgccatcgctattgccgtcgcccttgcgggtttcgcaaccgtggcgcaagca

SEQ ID NO: 1145 - DNA, 66 bp, Artificial Sequence
  source: /note="Description of Artificial Sequence: Synthetic oligonucleotide"
atgaaatatctgcttccaacggctgctgctggcctgttgcttcttgccgcccagcctgcgatggct

SEQ ID NO: 1146 - DNA, 1749 bp, Artificial Sequence
  source: /note="Description of Artificial Sequence: Synthetic oligonucleotide"
atgaaaaagatttggctggctcttgccggtttagtcctggcattcagcgcaagcgcggtcgactataaggatgacgacgacaagcaattgggcggtggcatctgggagcttaagaaggacgtgtatgtagtggagttagactggtatccagatgcccccggagagatggtggtcttaacatgtgacactccagaggaggacgggattacctggacacttgaccagtcaagcgaggtattgggttctggaaagacgcttactattcaagtcaaagaatttggggatgccgggcagtatacatgtcacaagggcggcgaagttctgtcgcactccttacttttgttacacaaaaaagaagacggcatttggtccacagacatccttaaggaccaaaaggagccgaagaataagacgtttctgcgctgtgaagcgaagaactatagtggtcgctttacttgctggtggttgacgaccatttccactgatttaaccttttcggtaaagagttctcgcgggagttccgacccacagggcgtgacttgtggcgcagccacactttcggcggaacgcgttcgtggggacaataaggaatacgaatattcggtcgagtgtcaggaagattcagcttgccctgccgctgaggagtcacttccgattgaagtgatggttgacgccgtgcacaaattaaagtatgaaaattacacgtcatctttctttatccgtgacattattaagcccgacccgccaaagaatctgcagcttaaacccctgaagaacagccgccaggtggaagtaagctgggaatatcctgacacctggtccactccgcattcgtatttctcgttgacgttttgtgttcaggtgcagggaaagagcaagcgcgaaaagaaggatcgcgtctttacagacaaaacgtccgcgacggttatttgtcgtaagaatgctagtatctctgttcgcgctcaggaccgttattactcatctagttggtcggagtgggcctcggttccctgctctgggggtggaggatcgggtggaggtggctcgggaggtggcggctcccgtaatttaccggtggctactcctgacccagggatgttcccgtgcttgcaccatagccaaaacttacttcgcgctgtcagcaacatgcttcagaaagcacgtcaaacgcttgagttttacccgtgtactagcgaagagatcgatcacgaggacattaccaaagacaaaacctccaccgtcgaggcctgccttccacttgaactgacgaaaaatgagtcatgcttaaattctcgtgaaacctccttcattactaacggatcgtgcctggcctcgcgcaagacttcgttcatgatggcattatgcttgtcgtctatttatgaagaccttaaaatgtatcaagtggagttcaagacgatgaatgcaaaacttcttatggacccgaagcgtcaaatcttcttagaccaaaacatgttggccgtgatcgatgaactgatgcaagccttgaattttaattcggaaactgtaccgcaaaaatcttctcttgaagaaccggatttctataagaccaaaattaaactttgtattttacttcacgctttccgcatccgtgcagtaactatcgaccgcgtaatgagttaccttaacgcctcgggtggcgagctcggtggcagtggtaagcctatccctaaccctctcctcggcctcgattctacgggatccggtcatcaccaccatcaccatcaccat

SEQ ID NO: 1147 - DNA, 1755 bp, Artificial Sequence
  source: /note="Description of Artificial Sequence: Synthetic oligonucleotide"
atgaaacagagcacaatcgctttagccttgctgcctcttcttttcacgcctgtcacgaaggcagtcgactataaggatgacgacgacaagcaattgggcggtggcatctgggagcttaagaaggacgtgtatgtagtggagttagactggtatccagatgcccccggagagatggtggtcttaacatgtgacactccagaggaggacgggattacctggacacttgaccagtcaagcgaggtattgggttctggaaagacgcttactattcaagtcaaagaatttggggatgccgggcagtatacatgtcacaagggcggcgaagttctgtcgcactccttacttttgttacacaaaaaagaagacggcatttggtccacagacatccttaaggaccaaaaggagccgaagaataagacgtttctgcgctgtgaagcgaagaactatagtggtcgctttacttgctggtggttgacgaccatttccactgatttaaccttttcggtaaagagttctcgcgggagttccgacccacagggcgtgacttgtggcgcagccacactttcggcggaacgcgttcgtggggacaataaggaatacgaatattcggtcgagtgtcaggaagattcagcttgccctgccgctgaggagtcacttccgattgaagtgatggttgacgccgtgcacaaattaaagtatgaaaattacacgtcatctttctttatccgtgacattattaagcccgacccgccaaagaatctgcagcttaaacccctgaagaacagccgccaggtggaagtaagctgggaatatcctgacacctggtccactccgcattcgtatttctcgttgacgttttgtgttcaggtgcagggaaagagcaagcgcgaaaagaaggatcgcgtctttacagacaaaacgtccgcgacggttatttgtcgtaagaatgctagtatctctgttcgcgctcaggaccgttattactcatctagttggtcggagtgggcctcggttccctgctctgggggtggaggatcgggtggaggtggctcgggaggtggcggctcccgtaatttaccggtggctactcctgacccagggatgttcccgtgcttgcaccatagccaaaacttacttcgcgctgtcagcaacatgcttcagaaagcacgtcaaacgcttgagttttacccgtgtactagcgaagagatcgatcacgaggacattaccaaagacaaaacctccaccgtcgaggcctgccttccacttgaactgacgaaaaatgagtcatgcttaaattctcgtgaaacctccttcattactaacggatcgtgcctggcctcgcgcaagacttcgttcatgatggcattatgcttgtcgtctatttatgaagaccttaaaatgtatcaagtggagttcaagacgatgaatgcaaaacttcttatggacccgaagcgtcaaatcttcttagaccaaaacatgttggccgtgatcgatgaactgatgcaagccttgaattttaattcggaaactgtaccgcaaaaatcttctcttgaagaaccggatttctataagaccaaaattaaactttgtattttacttcacgctttccgcatccgtgcagtaactatcgaccgcgtaatgagttaccttaacgcctcgggtggcgagctcggtggcagtggtaagcctatccctaaccctctcctcggcctcgattctacgggatccggtcatcaccaccatcaccatcaccat

SEQ ID NO: 1148 - DNA, 1755 bp, Artificial Sequence
  source: /note="Description of Artificial Sequence: Synthetic polynucleotide"
atgaagcaggctctgcgcgtggcatttgggttcctgatcttatgggcgtccgtcttacacgcagtcgactataaggatgacgacgacaagcaattgggcggtggcatctgggagcttaagaaggacgtgtatgtagtggagttagactggtatccagatgcccccggagagatggtggtcttaacatgtgacactccagaggaggacgggattacctggacacttgaccagtcaagcgaggtattgggttctggaaagacgcttactattcaagtcaaagaatttggggatgccgggcagtatacatgtcacaagggcggcgaagttctgtcgcactccttacttttgttacacaaaaaagaagacggcatttggtccacagacatccttaaggaccaaaaggagccgaagaataagacgtttctgcgctgtgaagcgaagaactatagtggtcgctttacttgctggtggttgacgaccatttccactgatttaaccttttcggtaaagagttctcgcgggagttccgacccacagggcgtgacttgtggcgcagccacactttcggcggaacgcgttcgtggggacaataaggaatacgaatattcggtcgagtgtcaggaagattcagcttgccctgccgctgaggagtcacttccgattgaagtgatggttgacgccgtgcacaaattaaagtatgaaaattacacgtcatctttctttatccgtgacattattaagcccgacccgccaaagaatctgcagcttaaacccctgaagaacagccgccaggtggaagtaagctgggaatatcctgacacctggtccactccgcattcgtatttctcgttgacgttttgtgttcaggtgcagggaaagagcaagcgcgaaaagaaggatcgcgtctttacagacaaaacgtccgcgacggttatttgtcgtaagaatgctagtatctctgttcgcgctcaggaccgttattactcatctagttggtcggagtgggcctcggttccctgctctgggggtggaggatcgggtggaggtggctcgggaggtggcggctcccgtaatttaccggtggctactcctgacccagggatgttcccgtgcttgcaccatagccaaaacttacttcgcgctgtcagcaacatgcttcagaaagcacgtcaaacgcttgagttttacccgtgtactagcgaagagatcgatcacgaggacattaccaaagacaaaacctccaccgtcgaggcctgccttccacttgaactgacgaaaaatgagtcatgcttaaattctcgtgaaacctccttcattactaacggatcgtgcctggcctcgcgcaagacttcgttcatgatggcattatgcttgtcgtctatttatgaagaccttaaaatgtatcaagtggagttcaagacgatgaatgcaaaacttcttatggacccgaagcgtcaaatcttcttagaccaaaacatgttggccgtgatcgatgaactgatgcaagccttgaattttaattcggaaactgtaccgcaaaaatcttctcttgaagaaccggatttctataagaccaaaattaaactttgtattttacttcacgctttccgcatccgtgcagtaactatcgaccgcgtaatgagttaccttaacgcctcgggtggcgagctcggtggcagtggtaagcctatccctaaccctctcctcggcctcgattctacgggatccggtcatcaccaccatcaccatcaccat

SEQ ID NO: 1149 - DNA, 1770 bp, Artificial Sequence
  source: /note="Description of Artificial Sequence: Synthetic polynucleotide"
atgaaaatcaagacgggggcacgcattcttgccttgagcgccttgacaacgatgatgttcagtgcaagtgcattagcggtcgactataaggatgacgacgacaagcaattgggcggtggcatctgggagcttaagaaggacgtgtatgtagtggagttagactggtatccagatgcccccggagagatggtggtcttaacatgtgacactccagaggaggacgggattacctggacacttgaccagtcaagcgaggtattgggttctggaaagacgcttactattcaagtcaaagaatttggggatgccgggcagtatacatgtcacaagggcggcgaagttctgtcgcactccttacttttgttacacaaaaaagaagacggcatttggtccacagacatccttaaggaccaaaaggagccgaagaataagacgtttctgcgctgtgaagcgaagaactatagtggtcgctttacttgctggtggttgacgaccatttccactgatttaaccttttcggtaaagagttctcgcgggagttccgacccacagggcgtgacttgtggcgcagccacactttcggcggaacgcgttcgtggggacaataaggaatacgaatattcggtcgagtgtcaggaagattcagcttgccctgccgctgaggagtcacttccgattgaagtgatggttgacgccgtgcacaaattaaagtatgaaaattacacgtcatctttctttatccgtgacattattaagcccgacccgccaaagaatctgcagcttaaacccctgaagaacagccgccaggtggaagtaagctgggaatatcctgacacctggtccactccgcattcgtatttctcgttgacgttttgtgttcaggtgcagggaaagagcaagcgcgaaaagaaggatcgcgtctttacagacaaaacgtccgcgacggttatttgtcgtaagaatgctagtatctctgttcgcgctcaggaccgttattactcatctagttggtcggagtgggcctcggttccctgctctgggggtggaggatcgggtggaggtggctcgggaggtggcggctcccgtaatttaccggtggctactcctgacccagggatgttcccgtgcttgcaccatagccaaaacttacttcgcgctgtcagcaacatgcttcagaaagcacgtcaaacgcttgagttttacccgtgtactagcgaagagatcgatcacgaggacattaccaaagacaaaacctccaccgtcgaggcctgccttccacttgaactgacgaaaaatgagtcatgcttaaattctcgtgaaacctccttcattactaacggatcgtgcctggcctcgcgcaagacttcgttcatgatggcattatgcttgtcgtctatttatgaagaccttaaaatgtatcaagtggagttcaagacgatgaatgcaaaacttcttatggacccgaagcgtcaaatcttcttagaccaaaacatgttggccgtgatcgatgaactgatgcaagccttgaattttaattcggaaactgtaccgcaaaaatcttctcttgaagaaccggatttctataagaccaaaattaaactttgtattttacttcacgctttccgcatccgtgcagtaactatcgaccgcgtaatgagttaccttaacgcctcgggtggcgagctcggtggcagtggtaagcctatccctaaccctctcctcggcctcgattctacgggatccggtcatcaccaccatcaccatcaccat

SEQ ID NO: 1150 - DNA, 1761 bp, Artificial Sequence
  source: /note="Description of Artificial Sequence: Synthetic polynucleotide"
atgaataagaaagtcttgacattgtcggcggtcatggcctcgatgttgttcggggcagcagcccacgcagtcgactataaggatgacgacgacaagcaattgggcggtggcatctgggagcttaagaaggacgtgtatgtagtggagttagactggtatccagatgcccccggagagatggtggtcttaacatgtgacactccagaggaggacgggattacctggacacttgaccagtcaagcgaggtattgggttctggaaagacgcttactattcaagtcaaagaatttggggatgccgggcagtatacatgtcacaagggcggcgaagttctgtcgcactccttacttttgttacacaaaaaagaagacggcatttggtccacagacatccttaaggaccaaaaggagccgaagaataagacgtttctgcgctgtgaagcgaagaactatagtggtcgctttacttgctggtggttgacgaccatttccactgatttaaccttttcggtaaagagttctcgcgggagttccgacccacagggcgtgacttgtggcgcagccacactttcggcggaacgcgttcgtggggacaataaggaatacgaatattcggtcgagtgtcaggaagattcagcttgccctgccgctgaggagtcacttccgattgaagtgatggttgacgccgtgcacaaattaaagtatgaaaattacacgtcatctttctttatccgtgacattattaagcccgacccgccaaagaatctgcagcttaaacccctgaagaacagccgccaggtggaagtaagctgggaatatcctgacacctggtccactccgcattcgtatttctcgttgacgttttgtgttcaggtgcagggaaagagcaagcgcgaaaagaaggatcgcgtctttacagacaaaacgtccgcgacggttatttgtcgtaagaatgctagtatctctgttcgcgctcaggaccgttattactcatctagttggtcggagtgggcctcggttccctgctctgggggtggaggatcgggtggaggtggctcgggaggtggcggctcccgtaatttaccggtggctactcctgacccagggatgttcccgtgcttgcaccatagccaaaacttacttcgcgctgtcagcaacatgcttcagaaagcacgtcaaacgcttgagttttacccgtgtactagcgaagagatcgatcacgaggacattaccaaagacaaaacctccaccgtcgaggcctgccttccacttgaactgacgaaaaatgagtcatgcttaaattctcgtgaaacctccttcattactaacggatcgtgcctggcctcgcgcaagacttcgttcatgatggcattatgcttgtcgtctatttatgaagaccttaaaatgtatcaagtggagttcaagacgatgaatgcaaaacttcttatggacccgaagcgtcaaatcttcttagaccaaaacatgttggccgtgatcgatgaactgatgcaagccttgaattttaattcggaaactgtaccgcaaaaatcttctcttgaagaaccggatttctataagaccaaaattaaactttgtattttacttcacgctttccgcatccgtgcagtaactatcgaccgcgtaatgagttaccttaacgcctcgggtggcgagctcggtggcagtggtaagcctatccctaaccctctcctcggcctcgattctacgggatccggtcatcaccaccatcaccatcaccat

SEQ ID NO: 1151 - DNA, 1758 bp, Artificial Sequence
  source: /note="Description of Artificial Sequence: Synthetic polynucleotide"
atgatgaagcgtaacatcttagccgttattgtccccgcattgcttgtggccgggacggctaacgcagtcgactataaggatgacgacgacaagcaattgggcggtggcatctgggagcttaagaaggacgtgtatgtagtggagttagactggtatccagatgcccccggagagatggtggtcttaacatgtgacactccagaggaggacgggattacctggacacttgaccagtcaagcgaggtattgggttctggaaagacgcttactattcaagtcaaagaatttggggatgccgggcagtatacatgtcacaagggcggcgaagttctgtcgcactccttacttttgttacacaaaaaagaagacggcatttggtccacagacatccttaaggaccaaaaggagccgaagaataagacgtttctgcgctgtgaagcgaagaactatagtggtcgctttacttgctggtggttgacgaccatttccactgatttaaccttttcggtaaagagttctcgcgggagttccgacccacagggcgtgacttgtggcgcagccacactttcggcggaacgcgttcgtggggacaataaggaatacgaatattcggtcgagtgtcaggaagattcagcttgccctgccgctgaggagtcacttccgattgaagtgatggttgacgccgtgcacaaattaaagtatgaaaattacacgtcatctttctttatccgtgacattattaagcccgacccgccaaagaatctgcagcttaaacccctgaagaacagccgccaggtggaagtaagctgggaatatcctgacacctggtccactccgcattcgtatttctcgttgacgttttgtgttcaggtgcagggaaagagcaagcgcgaaaagaaggatcgcgtctttacagacaaaacgtccgcgacggttatttgtcgtaagaatgctagtatctctgttcgcgctcaggaccgttattactcatctagttggtcggagtgggcctcggttccctgctctgggggtggaggatcgggtggaggtggctcgggaggtggcggctcccgtaatttaccggtggctactcctgacccagggatgttcccgtgcttgcaccatagccaaaacttacttcgcgctgtcagcaacatgcttcagaaagcacgtcaaacgcttgagttttacccgtgtactagcgaagagatcgatcacgaggacattaccaaagacaaaacctccaccgtcgaggcctgccttccacttgaactgacgaaaaatgagtcatgcttaaattctcgtgaaacctccttcattactaacggatcgtgcctggcctcgcgcaagacttcgttcatgatggcattatgcttgtcgtctatttatgaagaccttaaaatgtatcaagtggagttcaagacgatgaatgcaaaacttcttatggacccgaagcgtcaaatcttcttagaccaaaacatgttggccgtgatcgatgaactgatgcaagccttgaattttaattcggaaactgtaccgcaaaaatcttctcttgaagaaccggatttctataagaccaaaattaaactttgtattttacttcacgctttccgcatccgtgcagtaactatcgaccgcgtaatgagttaccttaacgcctcgggtggcgagctcggtggcagtggtaagcctatccctaaccctctcctcggcctcgattctacgggatccggtcatcaccaccatcaccatcaccat

SEQ ID NO: 1152 - DNA, 1755 bp, Artificial Sequence
  source: /note="Description of Artificial Sequence: Synthetic polynucleotide"
atgaagaagactgccatcgctattgccgtcgcccttgcgggtttcgcaaccgtggcgcaagcagtcgactataaggatgacgacgacaagcaattgggcggtggcatctgggagcttaagaaggacgtgtatgtagtggagttagactggtatccagatgcccccggagagatggtggtcttaacatgtgacactccagaggaggacgggattacctggacacttgaccagtcaagcgaggtattgggttctggaaagacgcttactattcaagtcaaagaatttggggatgccgggcagtatacatgtcacaagggcggcgaagttctgtcgcactccttacttttgttacacaaaaaagaagacggcatttggtccacagacatccttaaggaccaaaaggagccgaagaataagacgtttctgcgctgtgaagcgaagaactatagtggtcgctttacttgctggtggttgacgaccatttccactgatttaaccttttcggtaaagagttctcgcgggagttccgacccacagggcgtgacttgtggcgcagccacactttcggcggaacgcgttcgtggggacaataaggaatacgaatattcggtcgagtgtcaggaagattcagcttgccctgccgctgaggagtcacttccgattgaagtgatggttgacgccgtgcacaaattaaagtatgaaaattacacgtcatctttctttatccgtgacattattaagcccgacccgccaaagaatctgcagcttaaacccctgaagaacagccgccaggtggaagtaagctgggaatatcctgacacctggtccactccgcattcgtatttctcgttgacgttttgtgttcaggtgcagggaaagagcaagcgcgaaaagaaggatcgcgtctttacagacaaaacgtccgcgacggttatttgtcgtaagaatgctagtatctctgttcgcgctcaggaccgttattactcatctagttggtcggagtgggcctcggttccctgctctgggggtggaggatcgggtggaggtggctcgggaggtggcggctcccgtaatttaccggtggctactcctgacccagggatgttcccgtgcttgcaccatagccaaaacttacttcgcgctgtcagcaacatgcttcagaaagcacgtcaaacgcttgagttttacccgtgtactagcgaagagatcgatcacgaggacattaccaaagacaaaacctccaccgtcgaggcctgccttccacttgaactgacgaaaaatgagtcatgcttaaattctcgtgaaacctccttcattactaacggatcgtgcctggcctcgcgcaagacttcgttcatgatggcattatgcttgtcgtctatttatgaagaccttaaaatgtatcaagtggagttcaagacgatgaatgcaaaacttcttatggacccgaagcgtcaaatcttcttagaccaaaacatgttggccgtgatcgatgaactgatgcaagccttgaattttaattcggaaactgtaccgcaaaaatcttctcttgaagaaccggatttctataagaccaaaattaaactttgtattttacttcacgctttccgcatccgtgcagtaactatcgaccgcgtaatgagttaccttaacgcctcgggtggcgagctcggtggcagtggtaagcctatccctaaccctctcctcggcctcgattctacgggatccggtcatcaccaccatcaccatcaccat

SEQ ID NO: 1153 - DNA, 1746 bp, Artificial Sequence
  source: /note="Description of Artificial Sequence: Synthetic polynucleotide"
atgcgcgtgttattgttcttgctgctgagcttgtttatgttaccagctttcagtgtcgactataaggatgacgacgacaagcaattgggcggtggcatctgggagcttaagaaggacgtgtatgtagtggagttagactggtatccagatgcccccggagagatggtggtcttaacatgtgacactccagaggaggacgggattacctggacacttgaccagtcaagcgaggtattgggttctggaaagacgcttactattcaagtcaaagaatttggggatgccgggcagtatacatgtcacaagggcggcgaagttctgtcgcactccttacttttgttacacaaaaaagaagacggcatttggtccacagacatccttaaggaccaaaaggagccgaagaataagacgtttctgcgctgtgaagcgaagaactatagtggtcgctttacttgctggtggttgacgaccatttccactgatttaaccttttcggtaaagagttctcgcgggagttccgacccacagggcgtgacttgtggcgcagccacactttcggcggaacgcgttcgtggggacaataaggaatacgaatattcggtcgagtgtcaggaagattcagcttgccctgccgctgaggagtcacttccgattgaagtgatggttgacgccgtgcacaaattaaagtatgaaaattacacgtcatctttctttatccgtgacattattaagcccgacccgccaaagaatctgcagcttaaacccctgaagaacagccgccaggtggaagtaagctgggaatatcctgacacctggtccactccgcattcgtatttctcgttgacgttttgtgttcaggtgcagggaaagagcaagcgcgaaaagaaggatcgcgtctttacagacaaaacgtccgcgacggttatttgtcgtaagaatgctagtatctctgttcgcgctcaggaccgttattactcatctagttggtcggagtgggcctcggttccctgctctgggggtggaggatcgggtggaggtggctcgggaggtggcggctcccgtaatttaccggtggctactcctgacccagggatgttcccgtgcttgcaccatagccaaaacttacttcgcgctgtcagcaacatgcttcagaaagcacgtcaaacgcttgagttttacccgtgtactagcgaagagatcgatcacgaggacattaccaaagacaaaacctccaccgtcgaggcctgccttccacttgaactgacgaaaaatgagtcatgcttaaattctcgtgaaacctccttcattactaacggatcgtgcctggcctcgcgcaagacttcgttcatgatggcattatgcttgtcgtctatttatgaagaccttaaaatgtatcaagtggagttcaagacgatgaatgcaaaacttcttatggacccgaagcgtcaaatcttcttagaccaaaacatgttggccgtgatcgatgaactgatgcaagccttgaattttaattcggaaactgtaccgcaaaaatcttctcttgaagaaccggatttctataagaccaaaattaaactttgtattttacttcacgctttccgcatccgtgcagtaactatcgaccgcgtaatgagttaccttaacgcctcgggtggcgagctcggtggcagtggtaagcctatccctaaccctctcctcggcctcgattctacgggatccggtcatcaccaccatcaccatcaccat

SEQ ID NO: 1154 - DNA, 1767 bp, Artificial Sequence
  source: /note="Description of Artificial Sequence: Synthetic polynucleotide"
atgatgattaccttacgcaagttgccccttgcggtagccgttgctgctggtgtgatgtccgcgcaagcaatggctgtcgactataaggatgacgacgacaagcaattgggcggtggcatctgggagcttaagaaggacgtgtatgtagtggagttagactggtatccagatgcccccggagagatggtggtcttaacatgtgacactccagaggaggacgggattacctggacacttgaccagtcaagcgaggtattgggttctggaaagacgcttactattcaagtcaaagaatttggggatgccgggcagtatacatgtcacaagggcggcgaagttctgtcgcactccttacttttgttacacaaaaaagaagacggcatttggtccacagacatccttaaggaccaaaaggagccgaagaataagacgtttctgcgctgtgaagcgaagaactatagtggtcgctttacttgctggtggttgacgaccatttccactgatttaaccttttcggtaaagagttctcgcgggagttccgacccacagggcgtgacttgtggcgcagccacactttcggcggaacgcgttcgtggggacaataaggaatacgaatattcggtcgagtgtcaggaagattcagcttgccctgccgctgaggagtcacttccgattgaagtgatggttgacgccgtgcacaaattaaagtatgaaaattacacgtcatctttctttatccgtgacattattaagcccgacccgccaaagaatctgcagcttaaacccctgaagaacagccgccaggtggaagtaagctgggaatatcctgacacctggtccactccgcattcgtatttctcgttgacgttttgtgttcaggtgcagggaaagagcaagcgcgaaaagaaggatcgcgtctttacagacaaaacgtccgcgacggttatttgtcgtaagaatgctagtatctctgttcgcgctcaggaccgttattactcatctagttggtcggagtgggcctcggttccctgctctgggggtggaggatcgggtggaggtggctcgggaggtggcggctcccgtaatttaccggtggctactcctgacccagggatgttcccgtgcttgcaccatagccaaaacttacttcgcgctgtcagcaacatgcttcagaaagcacgtcaaacgcttgagttttacccgtgtactagcgaagagatcgatcacgaggacattaccaaagacaaaacctccaccgtcgaggcctgccttccacttgaactgacgaaaaatgagtcatgcttaaattctcgtgaaacctccttcattactaacggatcgtgcctggcctcgcgcaagacttcgttcatgatggcattatgcttgtcgtctatttatgaagaccttaaaatgtatcaagtggagttcaagacgatgaatgcaaaacttcttatggacccgaagcgtcaaatcttcttagaccaaaacatgttggccgtgatcgatgaactgatgcaagccttgaattttaattcggaaactgtaccgcaaaaatcttctcttgaagaaccggatttctataagaccaaaattaaactttgtattttacttcacgctttccgcatccgtgcagtaactatcgaccgcgtaatgagttaccttaacgcctcgggtggcgagctcggtggcagtggtaagcctatccctaaccctctcctcggcctcgattctacgggatccggtcatcaccaccatcaccatcaccat

SEQ ID NO: 1155 - skipped

SEQ ID NO: 1156 - DNA, 1758 bp, Artificial Sequence
  source: /note="Description of Artificial Sequence: Synthetic polynucleotide"
atgaaatatcttcttccaacggctgctgctggtttattgcttcttgccgcccagcctgcgatggctgtcgactataaggatgacgacgacaagcaattgggcggtggcatctgggagcttaagaaggacgtgtatgtagtggagttagactggtatccagatgcccccggagagatggtggtcttaacatgtgacactccagaggaggacgggattacctggacacttgaccagtcaagcgaggtattgggttctggaaagacgcttactattcaagtcaaagaatttggggatgccgggcagtatacatgtcacaagggcggcgaagttctgtcgcactccttacttttgttacacaaaaaagaagacggcatttggtccacagacatccttaaggaccaaaaggagccgaagaataagacgtttctgcgctgtgaagcgaagaactatagtggtcgctttacttgctggtggttgacgaccatttccactgatttaaccttttcggtaaagagttctcgcgggagttccgacccacagggcgtgacttgtggcgcagccacactttcggcggaacgcgttcgtggggacaataaggaatacgaatattcggtcgagtgtcaggaagattcagcttgccctgccgctgaggagtcacttccgattgaagtgatggttgacgccgtgcacaaattaaagtatgaaaattacacgtcatctttctttatccgtgacattattaagcccgacccgccaaagaatctgcagcttaaacccctgaagaacagccgccaggtggaagtaagctgggaatatcctgacacctggtccactccgcattcgtatttctcgttgacgttttgtgttcaggtgcagggaaagagcaagcgcgaaaagaaggatcgcgtctttacagacaaaacgtccgcgacggttatttgtcgtaagaatgctagtatctctgttcgcgctcaggaccgttattactcatctagttggtcggagtgggcctcggttccctgctctgggggtggaggatcgggtggaggtggctcgggaggtggcggctcccgtaatttaccggtggctactcctgacccagggatgttcccgtgcttgcaccatagccaaaacttacttcgcgctgtcagcaacatgcttcagaaagcacgtcaaacgcttgagttttacccgtgtactagcgaagagatcgatcacgaggacattaccaaagacaaaacctccaccgtcgaggcctgccttccacttgaactgacgaaaaatgagtcatgcttaaattctcgtgaaacctccttcattactaacggatcgtgcctggcctcgcgcaagacttcgttcatgatggcattatgcttgtcgtctatttatgaagaccttaaaatgtatcaagtggagttcaagacgatgaatgcaaaacttcttatggacccgaagcgtcaaatcttcttagaccaaaacatgttggccgtgatcgatgaactgatgcaagccttgaattttaattcggaaactgtaccgcaaaaatcttctcttgaagaaccggatttctataagaccaaaattaaactttgtattttacttcacgctttccgcatccgtgcagtaactatcgaccgcgtaatgagttaccttaacgcctcgggtggcgagctcggtggcagtggtaagcctatccctaaccctctcctcggcctcgattctacgggatccggtcatcaccaccatcaccatcaccat

SEQ ID NO: 1157 - DNA, 99 bp, Artificial Sequence
  source: /note="Description of Artificial Sequence: Synthetic oligonucleotide"
atggggtacaaaatgaacattagctcgcttcgcaaagcattcatttttatgggggctgttgcagctttaagccttgtcaatgcccagtcagcgcttgcc

SEQ ID NO: 1158 - DNA, 57 bp, Artificial Sequence
  source: /note="Description of Artificial Sequence: Synthetic oligonucleotide"
atgaaaaagatttggctggctcttgccggtttagtcctggcattcagcgcaagcgcg

SEQ ID NO: 1159 - DNA, 63 bp, Artificial Sequence
  source: /note="Description of Artificial Sequence: Synthetic oligonucleotide"
atgaaacagagcacaatcgctttagccttgctgcctcttcttttcacgcctgtcacgaaggca

SEQ ID NO: 1160 - DNA, 63 bp, Artificial Sequence
  source: /note="Description of Artificial Sequence: Synthetic oligonucleotide"
atgaagcaggctctgcgcgtggcatttgggttcctgatcttatgggcgtccgtcttacacgca

SEQ ID NO: 1161 - DNA, 78 bp, Artificial Sequence
  source: /note="Description of Artificial Sequence: Synthetic oligonucleotide"
atgaaaatcaagacgggggcacgcattcttgccttgagcgccttgacaacgatgatgttcagtgcaagtgcattagcg

SEQ ID NO: 1162 - DNA, 69 bp, Artificial Sequence
  source: /note="Description of Artificial Sequence: Synthetic oligonucleotide"
atgaataagaaagtcttgacattgtcggcggtcatggcctcgatgttgttcggggcagcagcccacgca

SEQ ID NO: 1163 - DNA, 66 bp, Artificial Sequence
  source: /note="Description of Artificial Sequence: Synthetic oligonucleotide"
atgatgaagcgtaacatcttagccgttattgtccccgcattgcttgtggccgggacggctaacgca

SEQ ID NO: 1164 - DNA, 63 bp, Artificial Sequence; identical to SEQ ID NO: 1144
  source: /note="Description of Artificial Sequence: Synthetic oligonucleotide"

SEQ ID NO: 1165 - DNA, 54 bp, Artificial Sequence
  source: /note="Description of Artificial Sequence: Synthetic oligonucleotide"
atgcgcgtgttattgttcttgctgctgagcttgtttatgttaccagctttcagt

SEQ ID NO: 1166 - DNA, 75 bp, Artificial Sequence
  source: /note="Description of Artificial Sequence: Synthetic oligonucleotide"
atgatgattaccttacgcaagttgccccttgcggtagccgttgctgctggtgtgatgtccgcgcaagcaatggct

SEQ ID NO: 1167 - DNA, 66 bp, Artificial Sequence
  source: /note="Description of Artificial Sequence: Synthetic oligonucleotide"
atgaaatatcttcttccaacggctgctgctggtttattgcttcttgccgcccagcctgcgatggct

SEQ ID NO: 1168 - DNA, 1554 bp, Artificial Sequence
  source: /note="Description of Artificial Sequence: Synthetic polynucleotide"
atctgggagcttaagaaggacgtgtatgtagtggagttagactggtatccagatgcccccggagagatggtggtcttaacatgtgacactccagaggaggacgggattacctggacacttgaccagtcaagcgaggtattgggttctggaaagacgcttactattcaagtcaaagaatttggggatgccgggcagtatacatgtcacaagggcggcgaagttctgtcgcactccttacttttgttacacaaaaaagaagacggcatttggtccacagacatccttaaggaccaaaaggagccgaagaataagacgtttctgcgctgtgaagcgaagaactatagtggtcgctttacttgctggtggttgacgaccatttccactgatttaaccttttcggtaaagagttctcgcgggagttccgacccacagggcgtgacttgtggcgcagccacactttcggcggaacgcgttcgtggggacaataaggaatacgaatattcggtcgagtgtcaggaagattcagcttgccctgccgctgaggagtcacttccgattgaagtgatggttgacgccgtgcacaaattaaagtatgaaaattacacgtcatctttctttatccgtgacattattaagcccgacccgccaaagaatctgcagcttaaacccctgaagaacagccgccaggtggaagtaagctgggaatatcctgacacctggtccactccgcattcgtatttctcgttgacgttttgtgttcaggtgcagggaaagagcaagcgcgaaaagaaggatcgcgtctttacagacaaaacgtccgcgacggttatttgtcgtaagaatgctagtatctctgttcgcgctcaggaccgttattactcatctagttggtcggagtgggcctcggttccctgctctgggggtggaggatcgggtggaggtggctcgggaggtggcggctcccgtaatttaccggtggctactcctgacccagggatgttcccgtgcttgcaccatagccaaaacttacttcgcgctgtcagcaacatgcttcagaaagcacgtcaaacgcttgagttttacccgtgtactagcgaagagatcgatcacgaggacattaccaaagacaaaacctccaccgtcgaggcctgccttccacttgaactgacgaaaaatgagtcatgcttaaattctcgtgaaacctccttcattactaacggatcgtgcctggcctcgcgcaagacttcgttcatgatggcattatgcttgtcgtctatttatgaagaccttaaaatgtatcaagtggagttcaagacgatgaatgcaaaacttcttatggacccgaagcgtcaaatcttcttagaccaaaacatgttggccgtgatcgatgaactgatgcaagccttgaattttaattcggaaactgtaccgcaaaaatcttctcttgaagaaccggatttctataagaccaaaattaaactttgtattttacttcacgctttccgcatccgtgcagtaactatcgaccgcgtaatgagttaccttaacgcctcg

SEQ ID NO: 1169 - protein, 597 aa, Artificial Sequence
  source: /note="Description of Artificial Sequence: Synthetic polypeptide"
MGYKMNISSLRKAFIFMGAVAALSLVNAQSALAVDYKDDDDKQLGGGIWELKKDVYVVELDWYPDAPGEMVVLTCDTPEEDGITWTLDQSSEVLGSGKTLTIQVKEFGDAGQYTCHKGGEVLSHSLLLLHKKEDGIWSTDILKDQKEPKNKTFLRCEAKNYSGRFTCWWLTTISTDLTFSVKSSRGSSDPQGVTCGAATLSAERVRGDNKEYEYSVECQEDSACPAAEESLPIEVMVDAVHKLKYENYTSSFFIRDIIKPDPPKNLQLKPLKNSRQVEVSWEYPDTWSTPHSYFSLTFCVQVQGKSKREKKDRVFTDKTSATVICRKNASISVRAQDRYYSSSWSEWASVPCSGGGGSGGGGSGGGGSRNLPVATPDPGMFPCLHHSQNLLRAVSNMLQKARQTLEFYPCTSEEIDHEDITKDKTSTVEACLPLELTKNESCLNSRETSFITNGSCLASRKTSFMMALCLSSIYEDLKMYQVEFKTMNAKLLMDPKRQIFLDQNMLAVIDELMQALNFNSETVPQKSSLEEPDFYKTKIKLCILLHAFRIRAVTIDRVMSYLNASGGELGGSGKPIPNPLLGLDSTGSGHHHHHHHH

SEQ ID NO: 1170 - protein, 583 aa, Artificial Sequence
  source: /note="Description of Artificial Sequence: Synthetic polypeptide"
MKKIWLALAGLVLAFSASAVDYKDDDDKQLGGGIWELKKDVYVVELDWYPDAPGEMVVLTCDTPEEDGITWTLDQSSEVLGSGKTLTIQVKEFGDAGQYTCHKGGEVLSHSLLLLHKKEDGIWSTDILKDQKEPKNKTFLRCEAKNYSGRFTCWWLTTISTDLTFSVKSSRGSSDPQGVTCGAATLSAERVRGDNKEYEYSVECQEDSACPAAEESLPIEVMVDAVHKLKYENYTSSFFIRDIIKPDPPKNLQLKPLKNSRQVEVSWEYPDTWSTPHSYFSLTFCVQVQGKSKREKKDRVFTDKTSATVICRKNASISVRAQDRYYSSSWSEWASVPCSGGGGSGGGGSGGGGSRNLPVATPDPGMFPCLHHSQNLLRAVSNMLQKARQTLEFYPCTSEEIDHEDITKDKTSTVEACLPLELTKNESCLNSRETSFITNGSCLASRKTSFMMALCLSSIYEDLKMYQVEFKTMNAKLLMDPKRQIFLDQNMLAVIDELMQALNFNSETVPQKSSLEEPDFYKTKIKLCILLHAFRIRAVTIDRVMSYLNASGGELGGSGKPIPNPLLGLDSTGSGHHHHHHHH

SEQ ID NO: 1171 - protein, 585 aa, Artificial Sequence
  source: /note="Description of Artificial Sequence: Synthetic polypeptide"
MKQSTIALALLPLLFTPVTKAVDYKDDDDKQLGGGIWELKKDVYVVELDWYPDAPGEMVVLTCDTPEEDGITWTLDQSSEVLGSGKTLTIQVKEFGDAGQYTCHKGGEVLSHSLLLLHKKEDGIWSTDILKDQKEPKNKTFLRCEAKNYSGRFTCWWLTTISTDLTFSVKSSRGSSDPQGVTCGAATLSAERVRGDNKEYEYSVECQEDSACPAAEESLPIEVMVDAVHKLKYENYTSSFFIRDIIKPDPPKNLQLKPLKNSRQVEVSWEYPDTWSTPHSYFSLTFCVQVQGKSKREKKDRVFTDKTSATVICRKNASISVRAQDRYYSSSWSEWASVPCSGGGGSGGGGSGGGGSRNLPVATPDPGMFPCLHHSQNLLRAVSNMLQKARQTLEFYPCTSEEIDHEDITKDKTSTVEACLPLELTKNESCLNSRETSFITNGSCLASRKTSFMMALCLSSIYEDLKMYQVEFKTMNAKLLMDPKRQIFLDQNMLAVIDELMQALNFNSETVPQKSSLEEPDFYKTKIKLCILLHAFRIRAVTIDRVMSYLNASGGELGGSGKPIPNPLLGLDSTGSGHHHHHHHH

SEQ ID NO: 1172 - protein, 585 aa, Artificial Sequence
  source: /note="Description of Artificial Sequence: Synthetic polypeptide"
MKQALRVAFGFLILWASVLHAVDYKDDDDKQLGGGIWELKKDVYVVELDWYPDAPGEMVVLTCDTPEEDGITWTLDQSSEVLGSGKTLTIQVKEFGDAGQYTCHKGGEVLSHSLLLLHKKEDGIWSTDILKDQKEPKNKTFLRCEAKNYSGRFTCWWLTTISTDLTFSVKSSRGSSDPQGVTCGAATLSAERVRGDNKEYEYSVECQEDSACPAAEESLPIEVMVDAVHKLKYENYTSSFFIRDIIKPDPPKNLQLKPLKNSRQVEVSWEYPDTWSTPHSYFSLTFCVQVQGKSKREKKDRVFTDKTSATVICRKNASISVRAQDRYYSSSWSEWASVPCSGGGGSGGGGSGGGGSRNLPVATPDPGMFPCLHHSQNLLRAVSNMLQKARQTLEFYPCTSEEIDHEDITKDKTSTVEACLPLELTKNESCLNSRETSFITNGSCLASRKTSFMMALCLSSIYEDLKMYQVEFKTMNAKLLMDPKRQIFLDQNMLAVIDELMQALNFNSETVPQKSSLEEPDFYKTKIKLCILLHAFRIRAVTIDRVMSYLNASGGELGGSGKPIPNPLLGLDSTGSGHHHHHHHH

SEQ ID NO: 1173 - protein, 590 aa, Artificial Sequence
  source: /note="Description of Artificial Sequence: Synthetic polypeptide"
MKIKTGARILALSALTTMMFSASALAVDYKDDDDKQLGGGIWELKKDVYVVELDWYPDAPGEMVVLTCDTPEEDGITWTLDQSSEVLGSGKTLTIQVKEFGDAGQYTCHKGGEVLSHSLLLLHKKEDGIWSTDILKDQKEPKNKTFLRCEAKNYSGRFTCWWLTTISTDLTFSVKSSRGSSDPQGVTCGAATLSAERVRGDNKEYEYSVECQEDSACPAAEESLPIEVMVDAVHKLKYENYTSSFFIRDIIKPDPPKNLQLKPLKNSRQVEVSWEYPDTWSTPHSYFSLTFCVQVQGKSKREKKDRVFTDKTSATVICRKNASISVRAQDRYYSSSWSEWASVPCSGGGGSGGGGSGGGGSRNLPVATPDPGMFPCLHHSQNLLRAVSNMLQKARQTLEFYPCTSEEIDHEDITKDKTSTVEACLPLELTKNESCLNSRETSFITNGSCLASRKTSFMMALCLSSIYEDLKMYQVEFKTMNAKLLMDPKRQIFLDQNMLAVIDELMQALNFNSETVPQKSSLEEPDFYKTKIKLCILLHAFRIRAVTIDRVMSYLNASGGELGGSGKPIPNPLLGLDSTGSGHHHHHHHH

SEQ ID NO: 1174 - protein, 587 aa, Artificial Sequence
  source: /note="Description of Artificial Sequence: Synthetic polypeptide"
MNKKVLTLSAVMASMLFGAAAHAVDYKDDDDKQLGGGIWELKKDVYVVELDWYPDAPGEMVVLTCDTPEEDGITWTLDQSSEVLGSGKTLTIQVKEFGDAGQYTCHKGGEVLSHSLLLLHKKEDGIWSTDILKDQKEPKNKTFLRCEAKNYSGRFTCWWLTTISTDLTFSVKSSRGSSDPQGVTCGAATLSAERVRGDNKEYEYSVECQEDSACPAAEESLPIEVMVDAVHKLKYENYTSSFFIRDIIKPDPPKNLQLKPLKNSRQVEVSWEYPDTWSTPHSYFSLTFCVQVQGKSKREKKDRVFTDKTSATVICRKNASISVRAQDRYYSSSWSEWASVPCSGGGGSGGGGSGGGGSRNLPVATPDPGMFPCLHHSQNLLRAVSNMLQKARQTLEFYPCTSEEIDHEDITKDKTSTVEACLPLELTKNESCLNSRETSFITNGSCLASRKTSFMMALCLSSIYEDLKMYQVEFKTMNAKLLMDPKRQIFLDQNMLAVIDELMQALNFNSETVPQKSSLEEPDFYKTKIKLCILLHAFRIRAVTIDRVMSYLNASGGELGGSGKPIPNPLLGLDSTGSGHHHHHHHH

SEQ ID NO: 1175 - protein, 586 aa, Artificial Sequence
  source: /note="Description of Artificial Sequence: Synthetic polypeptide"
MMKRNILAVIVPALLVAGTANAVDYKDDDDKQLGGGIWELKKDVYVVELDWYPDAPGEMVVLTCDTPEEDGITWTLDQSSEVLGSGKTLTIQVKEFGDAGQYTCHKGGEVLSHSLLLLHKKEDGIWSTDILKDQKEPKNKTFLRCEAKNYSGRFTCWWLTTISTDLTFSVKSSRGSSDPQGVTCGAATLSAERVRGDNKEYEYSVECQEDSACPAAEESLPIEVMVDAVHKLKYENYTSSFFIRDIIKPDPPKNLQLKPLKNSRQVEVSWEYPDTWSTPHSYFSLTFCVQVQGKSKREKKDRVFTDKTSATVICRKNASISVRAQDRYYSSSWSEWASVPCSGGGGSGGGGSGGGGSRNLPVATPDPGMFPCLHHSQNLLRAVSNMLQKARQTLEFYPCTSEEIDHEDITKDKTSTVEACLPLELTKNESCLNSRETSFITNGSCLASRKTSFMMALCLSSIYEDLKMYQVEFKTMNAKLLMDPKRQIFLDQNMLAVIDELMQALNFNSETVPQKSSLEEPDFYKTKIKLCILLHAFRIRAVTIDRVMSYLNASGGELGGSGKPIPNPLLGLDSTGSGHHHHHHHH

SEQ ID NO: 1176 - protein, 585 aa, Artificial Sequence
  source: /note="Description of Artificial Sequence: Synthetic polypeptide"
MKKTAIAIAVALAGFATVAQAVDYKDDDDKQLGGGIWELKKDVYVVELDWYPDAPGEMVVLTCDTPEEDGITWTLDQSSEVLGSGKTLTIQVKEFGDAGQYTCHKGGEVLSHSLLLLHKKEDGIWSTDILKDQKEPKNKTFLRCEAKNYSGRFTCWWLTTISTDLTFSVKSSRGSSDPQGVTCGAATLSAERVRGDNKEYEYSVECQEDSACPAAEESLPIEVMVDAVHKLKYENYTSSFFIRDIIKPDPPKNLQLKPLKNSRQVEVSWEYPDTWSTPHSYFSLTFCVQVQGKSKREKKDRVFTDKTSATVICRKNASISVRAQDRYYSSSWSEWASVPCSGGGGSGGGGSGGGGSRNLPVATPDPGMFPCLHHSQNLLRAVSNMLQKARQTLEFYPCTSEEIDHEDITKDKTSTVEACLPLELTKNESCLNSRETSFITNGSCLASRKTSFMMALCLSSIYEDLKMYQVEFKTMNAKLLMDPKRQIFLDQNMLAVIDELMQALNFNSETVPQKSSLEEPDFYKTKIKLCILLHAFRIRAVTIDRVMSYLNASGGELGGSGKPIPNPLLGLDSTGSGHHHHHHHH

SEQ ID NO: 1177 - protein, 582 aa, Artificial Sequence
  source: /note="Description of Artificial Sequence: Synthetic polypeptide"
MRVLLFLLLSLFMLPAFSVDYKDDDDKQLGGGIWELKKDVYVVELDWYPDAPGEMVVLTCDTPEEDGITWTLDQSSEVLGSGKTLTIQVKEFGDAGQYTCHKGGEVLSHSLLLLHKKEDGIWSTDILKDQKEPKNKTFLRCEAKNYSGRFTCWWLTTISTDLTFSVKSSRGSSDPQGVTCGAATLSAERVRGDNKEYEYSVECQEDSACPAAEESLPIEVMVDAVHKLKYENYTSSFFIRDIIKPDPPKNLQLKPLKNSRQVEVSWEYPDTWSTPHSYFSLTFCVQVQGKSKREKKDRVFTDKTSATVICRKNASISVRAQDRYYSSSWSEWASVPCSGGGGSGGGGSGGGGSRNLPVATPDPGMFPCLHHSQNLLRAVSNMLQKARQTLEFYPCTSEEIDHEDITKDKTSTVEACLPLELTKNESCLNSRETSFITNGSCLASRKTSFMMALCLSSIYEDLKMYQVEFKTMNAKLLMDPKRQIFLDQNMLAVIDELMQALNFNSETVPQKSSLEEPDFYKTKIKLCILLHAFRIRAVTIDRVMSYLNASGGELGGSGKPIPNPLLGLDSTGSGHHHHHHHH

SEQ ID NO: 1178 - protein, 589 aa, Artificial Sequence
  source: /note="Description of Artificial Sequence: Synthetic polypeptide"
MMITLRKLPLAVAVAAGVMSAQAMAVDYKDDDDKQLGGGIWELKKDVYVVELDWYPDAPGEMVVLTCDTPEEDGITWTLDQSSEVLGSGKTLTIQVKEFGDAGQYTCHKGGEVLSHSLLLLHKKEDGIWSTDILKDQKEPKNKTFLRCEAKNYSGRFTCWWLTTISTDLTFSVKSSRGSSDPQGVTCGAATLSAERVRGDNKEYEYSVECQEDSACPAAEESLPIEVMVDAVHKLKYENYTSSFFIRDIIKPDPPKNLQLKPLKNSRQVEVSWEYPDTWSTPHSYFSLTFCVQVQGKSKREKKDRVFTDKTSATVICRKNASISVRAQDRYYSSSWSEWASVPCSGGGGSGGGGSGGGGSRNLPVATPDPGMFPCLHHSQNLLRAVSNMLQKARQTLEFYPCTSEEIDHEDITKDKTSTVEACLPLELTKNESCLNSRETSFITNGSCLASRKTSFMMALCLSSIYEDLKMYQVEFKTMNAKLLMDPKRQIFLDQNMLAVIDELMQALNFNSETVPQKSSLEEPDFYKTKIKLCILLHAFRIRAVTIDRVMSYLNASGGELGGSGKPIPNPLLGLDSTGSGHHHHHHHH

SEQ ID NO: 1179 - protein, 586 aa, Artificial Sequence
  source: /note="Description of Artificial Sequence: Synthetic polypeptide"
MKYLLPTAAAGLLLLAAQPAMAVDYKDDDDKQLGGGIWELKKDVYVVELDWYPDAPGEMVVLTCDTPEEDGITWTLDQSSEVLGSGKTLTIQVKEFGDAGQYTCHKGGEVLSHSLLLLHKKEDGIWSTDILKDQKEPKNKTFLRCEAKNYSGRFTCWWLTTISTDLTFSVKSSRGSSDPQGVTCGAATLSAERVRGDNKEYEYSVECQEDSACPAAEESLPIEVMVDAVHKLKYENYTSSFFIRDIIKPDPPKNLQLKPLKNSRQVEVSWEYPDTWSTPHSYFSLTFCVQVQGKSKREKKDRVFTDKTSATVICRKNASISVRAQDRYYSSSWSEWASVPCSGGGGSGGGGSGGGGSRNLPVATPDPGMFPCLHHSQNLLRAVSNMLQKARQTLEFYPCTSEEIDHEDITKDKTSTVEACLPLELTKNESCLNSRETSFITNGSCLASRKTSFMMALCLSSIYEDLKMYQVEFKTMNAKLLMDPKRQIFLDQNMLAVIDELMQALNFNSETVPQKSSLEEPDFYKTKIKLCILLHAFRIRAVTIDRVMSYLNASGGELGGSGKPIPNPLLGLDSTGSGHHHHHHHH

SEQ ID NO: 1180 - protein, 33 aa, Artificial Sequence
  source: /note="Description of Artificial Sequence: Synthetic polypeptide"
MGYKMNISSLRKAFIFMGAVAALSLVNAQSALA

SEQ ID NO: 1181 - protein, 19 aa, Artificial Sequence
  source: /note="Description of Artificial Sequence: Synthetic peptide"
MKKIWLALAGLVLAFSASA

SEQ ID NO: 1182 - protein, 21 aa, Artificial Sequence
  source: /note="Description of Artificial Sequence: Synthetic peptide"
MKQSTIALALLPLLFTPVTKA

SEQ ID NO: 1183 - protein, 21 aa, Artificial Sequence
  source: /note="Description of Artificial Sequence: Synthetic peptide"
MKQALRVAFGFLILWASVLHA

SEQ ID NO: 1184 - protein, 26 aa, Artificial Sequence
  source: /note="Description of Artificial Sequence: Synthetic peptide"
MKIKTGARILALSALTTMMFSASALA

SEQ ID NO: 1185 - protein, 23 aa, Artificial Sequence
  source: /note="Description of Artificial Sequence: Synthetic peptide"
MNKKVLTLSAVMASMLFGAAAHA

SEQ ID NO: 1186 - protein, 26 aa, Artificial Sequence
  source: /note="Description of Artificial Sequence: Synthetic peptide"
MTNITKRSLVAAGVLAALMAGNVALA

SEQ ID NO: 1187 - protein, 21 aa, Artificial Sequence
  source: /note="Description of Artificial Sequence: Synthetic peptide"
MKKTAIAIAVALAGFATVAQA

SEQ ID NO: 1188 - protein, 18 aa, Artificial Sequence
  source: /note="Description of Artificial Sequence: Synthetic peptide"
MRVLLFLLLSLFMLPAFS

SEQ ID NO: 1189 - protein, 25 aa, Artificial Sequence
  source: /note="Description of Artificial Sequence: Synthetic peptide"
MMITLRKLPLAVAVAAGVMSAQAMA

SEQ ID NO: 1190 - protein, 22 aa, Artificial Sequence
  source: /note="Description of Artificial Sequence: Synthetic peptide"
MKYLLPTAAAGLLLLAAQPAMA

SEQ ID NO: 1191 - protein, 518 aa, Artificial Sequence
  source: /note="Description of Artificial Sequence: Synthetic polypeptide"
IWELKKDVYVVELDWYPDAPGEMVVLTCDTPEEDGITWTLDQSSEVLGSGKTLTIQVKEFGDAGQYTCHKGGEVLSHSLLLLHKKEDGIWSTDILKDQKEPKNKTFLRCEAKNYSGRFTCWWLTTISTDLTFSVKSSRGSSDPQGVTCGAATLSAERVRGDNKEYEYSVECQEDSACPAAEESLPIEVMVDAVHKLKYENYTSSFFIRDIIKPDPPKNLQLKPLKNSRQVEVSWEYPDTWSTPHSYFSLTFCVQVQGKSKREKKDRVFTDKTSATVICRKNASISVRAQDRYYSSSWSEWASVPCSGGGGSGGGGSGGGGSRNLPVATPDPGMFPCLHHSQNLLRAVSNMLQKARQTLEFYPCTSEEIDHEDITKDKTSTVEACLPLELTKNESCLNSRETSFITNGSCLASRKTSFMMALCLSSIYEDLKMYQVEFKTMNAKLLMDPKRQIFLDQNMLAVIDELMQALNFNSETVPQKSSLEEPDFYKTKIKLCILLHAFRIRAVTIDRVMSYLNAS

SEQ ID NO: 1192 - protein, 305 aa, Homo sapiens
IWELKKDVYVVELDWYPDAPGEMVVLTCDTPEEDGITWTLDQSSEVLGSGKTLTIQVKEFGDAGQYTCHKGGEVLSHSLLLLHKKEDGIWSTDILKDQKEPKNKTFLRCEAKNYSGRFTCWWLTTISTDLTFSVKSSRGSSDPQGVTCGAATLSAERVRGDNKEYEYSVECQEDSACPAAEESLPIEVMVDAVHKLKYENYTSSFFIRDIIKPDPPKNLQLKPLKNSRQVEVSWEYPDTWSTPHSYFSLTFCVQVQGKSKREKKDRVFTDKTSATVICRKNASISVRAQDRYYSSSWSEWASVPC

SEQ ID NO: 1193 - protein, 197 aa, Homo sapiens; identical to SEQ ID NO: 1053

SEQ ID NO: 1194 - protein, 16 aa, Artificial Sequence
  source: /note="Description of Artificial Sequence: Synthetic peptide"
SGGGGSGGGGSGGGGS

SEQ ID NO: 1195 - DNA, 711 bp, Artificial Sequence
  source: /note="Description of Artificial Sequence: Synthetic polynucleotide"
atggggtacaaaatgaacattagctcgcttcgcaaagcattcatttttatgggggctgttgcagctttaagccttgtcaatgcccagtcagcgcttgccatgatcacttgtccgccccccatgtctgtggaacacgcggatatttgggtaaagagctactcactgtacagccgtgaacgttatatttgtaactccggcttcaaacgcaaagcaggaacttcatcactgacggagtgtgttttaaataaagctactaacgtcgcgcactggactactccctcattgaagtgcatccgtgatcctgctctgggtggcgggggtagcggcgggggtggaagcgggggtggagggtctggaggaggtgggtctaactgggtgaatgttatctcagatttaaagaaaattgaagacctgatccaatctatgcacatcgacgctactctgtatacagaatcagatgtacatccttcgtgtaaagtgaccgcgatgaagtgttttttgcttgagctgcaagtaatttcccttgagtccggggacgcttcaatccatgacacggtcgagaacctgatcattctggcaaacaatagtttatcatcgaacggtaatgttaccgaatcgggttgcaaagaatgcgaagagttagaggaaaagaacattaaagaatttttgcaatccttcgttcacattgtgcagatgttcattaatacatcg

SEQ ID NO: 1196 - DNA, 666 bp, Artificial Sequence
  source: /note="Description of Artificial Sequence: Synthetic polynucleotide"
atgcgcgtgttattgttcttgctgctgagcttgtttatgttaccagctttcagtatgatcacttgtccgccccccatgtctgtggaacacgcggatatttgggtaaagagctactcactgtacagccgtgaacgttatatttgtaactccggcttcaaacgcaaagcaggaacttcatcactgacggagtgtgttttaaataaagctactaacgtcgcgcactggactactccctcattgaagtgcatccgtgatcctgctctgggtggcgggggtagcggcgggggtggaagcgggggtggagggtctggaggaggtgggtctaactgggtgaatgttatctcagatttaaagaaaattgaagacctgatccaatctatgcacatcgacgctactctgtatacagaatcagatgtacatccttcgtgtaaagtgaccgcgatgaagtgttttttgcttgagctgcaagtaatttcccttgagtccggggacgcttcaatccatgacacggtcgagaacctgatcattctggcaaacaatagtttatcatcgaacggtaatgttaccgaatcgggttgcaaagaatgcgaagagttagaggaaaagaacattaaagaatttttgcaatccttcgttcacattgtgcagatgttcattaatacatcg

SEQ ID NO: 1197 - DNA, 678 bp, Artificial Sequence
  source: /note="Description of Artificial Sequence: Synthetic polynucleotide"
atgaaatatcttcttccaacggctgctgctggtttattgcttcttgccgcccagcctgcgatggctatgatcacttgtccgccccccatgtctgtggaacacgcggatatttgggtaaagagctactcactgtacagccgtgaacgttatatttgtaactccggcttcaaacgcaaagcaggaacttcatcactgacggagtgtgttttaaataaagctactaacgtcgcgcactggactactccctcattgaagtgcatccgtgatcctgctctgggtggcgggggtagcggcgggggtggaagcgggggtggagggtctggaggaggtgggtctaactgggtgaatgttatctcagatttaaagaaaattgaagacctgatccaatctatgcacatcgacgctactctgtatacagaatcagatgtacatccttcgtgtaaagtgaccgcgatgaagtgttttttgcttgagctgcaagtaatttcccttgagtccggggacgcttcaatccatgacacggtcgagaacctgatcattctggcaaacaatagtttatcatcgaacggtaatgttaccgaatcgggttgcaaagaatgcgaagagttagaggaaaagaacattaaagaatttttgcaatccttcgttcacattgtgcagatgttcattaatacatcg

SEQ ID NO: 1198 - DNA, 612 bp, Artificial Sequence
  source: /note="Description of Artificial Sequence: Synthetic polynucleotide"
atgatcacttgtccgccccccatgtctgtggaacacgcggatatttgggtaaagagctactcactgtacagccgtgaacgttatatttgtaactccggcttcaaacgcaaagcaggaacttcatcactgacggagtgtgttttaaataaagctactaacgtcgcgcactggactactccctcattgaagtgcatccgtgatcctgctctgggtggcgggggtagcggcgggggtggaagcgggggtggagggtctggaggaggtgggtctaactgggtgaatgttatctcagatttaaagaaaattgaagacctgatccaatctatgcacatcgacgctactctgtatacagaatcagatgtacatccttcgtgtaaagtgaccgcgatgaagtgttttttgcttgagctgcaagtaatttcccttgagtccggggacgcttcaatccatgacacggtcgagaacctgatcattctggcaaacaatagtttatcatcgaacggtaatgttaccgaatcgggttgcaaagaatgcgaagagttagaggaaaagaacattaaagaatttttgcaatccttcgttcacattgtgcagatgttcattaatacatcg

SEQ ID NO: 1199 - protein, 20 aa, Artificial Sequence
  source: /note="Description of Artificial Sequence: Synthetic peptide"
GGGGSGGGGSGGGGSGGGGS

SEQ ID NO: 1200 - protein, 237 aa, Artificial Sequence
  source: /note="Description of Artificial Sequence: Synthetic polypeptide"
MGYKMNISSLRKAFIFMGAVAALSLVNAQSALAMITCPPPMSVEHADIWVKSYSLYSRERYICNSGFKRKAGTSSLTECVLNKATNVAHWTTPSLKCIRDPALGGGGSGGGGSGGGGSGGGGSNWVNVISDLKKIEDLIQSMHIDATLYTESDVHPSCKVTAMKCFLLELQVISLESGDASIHDTVENLIILANNSLSSNGNVTESGCKECEELEEKNIKEFLQSFVHIVQMFINTS

SEQ ID NO: 1201 - protein, 222 aa, Artificial Sequence
  source: /note="Description of Artificial Sequence: Synthetic polypeptide"
MRVLLFLLLSLFMLPAFSMITCPPPMSVEHADIWVKSYSLYSRERYICNSGFKRKAGTSSLTECVLNKATNVAHWTTPSLKCIRDPALGGGGSGGGGSGGGGSGGGGSNWVNVISDLKKIEDLIQSMHIDATLYTESDVHPSCKVTAMKCFLLELQVISLESGDASIHDTVENLIILANNSLSSNGNVTESGCKECEELEEKNIKEFLQSFVHIVQMFINTS

SEQ ID NO: 1202 - protein, 226 aa, Artificial Sequence
  source: /note="Description of Artificial Sequence: Synthetic polypeptide"
MKYLLPTAAAGLLLLAAQPAMAMITCPPPMSVEHADIWVKSYSLYSRERYICNSGFKRKAGTSSLTECVLNKATNVAHWTTPSLKCIRDPALGGGGSGGGGSGGGGSGGGGSNWVNVISDLKKIEDLIQSMHIDATLYTESDVHPSCKVTAMKCFLLELQVISLESGDASIHDTVENLIILANNSLSSNGNVTESGCKECEELEEKNIKEFLQSFVHIVQMFINTS

SEQ ID NO: 1203 - protein, 204 aa, Artificial Sequence
  source: /note="Description of Artificial Sequence: Synthetic polypeptide"
MITCPPPMSVEHADIWVKSYSLYSRERYICNSGFKRKAGTSSLTECVLNKATNVAHWTTPSLKCIRDPALGGGGSGGGGSGGGGSGGGGSNWVNVISDLKKIEDLIQSMHIDATLYTESDVHPSCKVTAMKCFLLELQVISLESGDASIHDTVENLIILANNSLSSNGNVTESGCKECEELEEKNIKEFLQSFVHIVQMFINTS

SEQ ID NO: 1204 - protein, 114 aa, Homo sapiens; identical to SEQ ID NO: 1057

SEQ ID NO: 1205 - protein, 73 aa, Artificial Sequence; identical to SEQ ID NO: 1061
  source: /note="Description of Artificial Sequence: Synthetic polypeptide"

SEQ ID NO: 1206 - protein, 94 aa, Artificial Sequence; identical to SEQ ID NO: 1073
  source: /note="Description of Artificial Sequence: Synthetic polypeptide"

SEQ ID NO: 1207 - DNA, 222 bp, Artificial Sequence; identical to SEQ ID NO: 1071
  source: /note="Description of Artificial Sequence: Synthetic polynucleotide"

SEQ ID NO: 1208 - DNA, 285 bp, Artificial Sequence
  source: /note="Description of Artificial Sequence: Synthetic polynucleotide"
atgaagcaaagtacgatcgcccttgcgctgttgccccttcttttcacgcccgtcaccaaggcagtgcccctgagccgcaccgtgcgttgtacgtgtatctccatctcaaaccagccggtaaacccgcgtagtttagaaaaactggagattatcccagccagccagttttgcccgcgcgttgagattattgcgaccatgaagaaaaaaggggaaaaacgttgccttaatccagaaagtaaggctatcaaaaacctgttgaaagctgtctcgaaagagcgttcctaa

SEQ ID NO: 1209 - protein, 273 aa, Artificial Sequence
  source: /note="Description of Artificial Sequence: Synthetic polypeptide"
MDFSNMSILHYLANIVDILVVWFVIYKVIMLIRGTKAVQLLKGIFIIIAVKLLSGFFGLQTVEWITDQMLTWGFLAIIIIFQPELRRALETLGRGNIFTRYGSRIEREQHHLIESIEKSTQYMAKRRIGALISVARDTGMDDYIETGIPLNAKISSQLLINIFIPNTPLHDGAVIIKGNEIASAASYLPLSDSPFLSKELGTRHRAALGISEVTDSITIVVSEETGGISLTKGGELFRDVSEEELHKILLKELVTVTAKKPSIFSKWKGGKSE

SEQ ID NO: 1210 - DNA, 822 bp, Artificial Sequence
  source: /note="Description of Artificial Sequence: Synthetic polynucleotide"
atggacttttccaacatgagtatccttcactatttagcgaatattgtagacattttggtggtttggttcgtaatttacaaggttatcatgcttatccgcggcacgaaagccgtccagctgttgaaggggattttcattattattgccgtcaagttacttagcggcttcttcggattgcagacagtggaatggattactgatcaaatgctgacttggggtttcttagccattatcattatctttcaaccggaattgcgtcgtgccctggagactttggggcgtggcaatatctttacccgctatggatcacgcattgagcgtgaacaacaccaccttattgagtctattgaaaagtccacgcaatacatggcgaagcgtcgcattggagctttgatctctgtggctcgtgatacaggcatggacgactacatcgagactggcattccgcttaatgcgaaaatctcatcgcaattattgattaatatcttcatccccaatacccctcttcacgatggcgcagtgatcattaaaggtaacgagatcgcgagcgctgccagttatctgccattgtccgactcgccgtttctttctaaggagctgggaactcgccatcgtgccgcattagggatttccgaggtgacagattcaatcacaatcgttgtcagcgaggaaacaggtgggatttcccttacgaagggaggcgaactgttccgtgatgtatccgaagaagaattgcataagattttgcttaaagagctggtgactgtcacagctaaaaaaccaagcattttctccaaatggaaaggaggtaagtccgagtga

SEQ ID NO: 1211 - DNA, 3787 bp, Artificial Sequence
  source: /note="Description of Artificial Sequence: Synthetic polynucleotide"
tagcggagtgtatactggcttactatgttggcactgatgagggtgtcagtgaagtgcttcatgtggcaggagaaaaaaggctgcaccggtgcgtcagcagaatatgtgatacaggatatattccgcttcctcgctcactgactcgctacgctcggtcgttcgactgcggcgagcggaaatggcttacgaacggggcggagatttcctggaagatgccaggaagatacttaacagggaagtgagagggccgcggcaaagccgtttttccataggctccgcccccctgacaagcatcacgaaatctgacgctcaaatcagtggtggcgaaacccgacaggactataaagataccaggcgtttcccctggcggctccctcgtgcgctctcctgttcctgcctttcggtttaccggtgtcattccgctgttatggccgcgtttgtctcattccacgcctgacactcagttccgggtaggcagttcgctccaagctggactgtatgcacgaaccccccgttcagtccgaccgctgcgccttatccggtaactatcgtcttgagtccaacccggaaagacatgcaaaagcaccactggcagcagccactggtaattgatttagaggagttagtcttgaagtcatgcgccggttaaggctaaactgaaaggacaagttttggtgactgcgctcctccaagccagttacctcggttcaaagagttggtagctcagagaaccttcgaaaaaccgccctgcaaggcggttttttcgttttcagagcaagagattacgcgcagaccaaaacgatctcaagaagatcatcttattaaggggtctgacgctcagtggaacggtgcaccctgcagggctagctgataaagcgttcgcgctgcattcggcagtttaagacccactttcacatttaagttgtttttctaatccgcatatgatcaattcaaggccgaataagaaggctggctctgcaccttggtgatcaaataattcgatagcttgtcgtaataatggcggcatactatcagtagtaggtgtttccctttcttctttagcgacttgatgctcttgatcttccaatacgcaacctaaagtaaaatgccccacagcgctgagtgcatataatgcattctctagtgaaaaaccttgttggcataaaaaggctaattgattttcgagagtttcatactgtttttctgtaggccgtgtacctaaatgtacttttgctccatcgcgatgacttagtaaagcacatctaaaacttttagcgttattacgtaaaaaatcttgccagctttccccttctaaagggcaaaagtgagtatggtgcctatctaacatctcaatggctaaggcgtcgagcaaagcccgcttattttttacatgccaatacaatgtaggctgctctacacctagcttctgggcgagtttacgggttgttaaaccttcgattccgacctcattaagcagctctaatgcgctgttaatcactttacttttatctaatctagacatcattaattcctaatttttgttgacactctatcattgatagagttattttaccactccctatcagtgatagagaaaagtgaacccgcatcccacgctaactaatataaggggggcaagaatggacttttccaacatgagtatccttcactatttagcgaatattgtagacattttggtggtttggttcgtaatttacaaggttatcatgcttatccgcggcacgaaagccgtccagctgttgaaggggattttcattattattgccgtcaagttacttagcggcttcttcggattgcagacagtggaatggattactgatcaaatgctgacttggggtttcttagccattatcattatctttcaaccggaattgcgtcgtgccctggagactttggggcgtggcaatatctttacccgctatggatcacgcattgagcgtgaacaacaccaccttattgagtctattgaaaagtccacgcaatacatggcgaagcgtcgcattggagctttgatctctgtggctcgtgatacaggcatggacgactacatcgagactggcattccgcttaatgcgaaaatctcatcgcaattattgattaatatcttcatccccaatacccctcttcacgatggcgcagtgatcattaaaggtaacgagatcgcgagcgctgccagttatctgccattgtccgactcgccgtttctttctaaggagctgggaactcgccatcgtgccgcattagggatttccgaggtgacagattcaatcacaatcgttgtcagcgaggaaacaggtgggatttcccttacgaagggaggcgaactgttccgtgatgtatccgaagaagaattgcataagattttgcttaaagagctggtgactgtcacagctaaaaaaccaagcattttctccaaatggaaaggaggtaagtccgagtgaggaggaacgattggtaaacccggtgaacgcatgagaaagcccccggaagatcaccttccgggggcttttttattgcgcggaccaaaacgaaaaaagacgctcgaaagcgtctcttttctggaatttggtaccgaggcgtaatgctctgccagtgttacaaccaattaaccaattctgattagaaaaactcatcgagcatcaaatgaaactgcaatttattcatatcaggattatcaataccatatttttgaaaaagccgtttctgtaatgaaggagaaaactcaccgaggcagttccataggatggcaagatcctggtatcggtctgcgattccgactcgtccaacatcaatacaacctattaatttcccctcgtcaaaaataaggttatcaagtgagaaatcaccatgagtgacgactgaatccggtgagaatggcaaaagcttatgcatttctttccagacttgttcaacaggccagccattacgctcgtcatcaaaatcactcgcatcaaccaaaccgttattcattcgtgattgcgcctgagcgagacgaaatacgcgatcgctgttaaaaggacaattacaaacaggaatcgaatgcaaccggcgcaggaacactgccagcgcatcaacaatattttcacctgaatcaggatattcttctaatacctggaatgctgttttcccggggatcgcagtggtgagtaaccatgcatcatcaggagtacggataaaatgcttgatggtcggaagaggcataaattccgtcagccagtttagtctgaccatctcatctgtaacatcattggcaacgctacctttgccatgtttcagaaacaactctggcgcatcgggcttcccatacaatcgatagattgtcgcacctgattgcccgacattatcgcgagcccatttatacccatataaatcagcatccatgttggaatttaatcgcggcctcgagcaagacgtttcccgttgaatatggctcataacaccccttgtattactgtttatgtaagcagacagttttattgttcatgatgatatatttttatcttgtgcaatgtaacatcagagattttgagacacaacgtggctttgttgaataaatcgaacttttgctgagttgaaggatcagatcacgcatcttcccgacaacgcagaccgttccgtggcaaagcaaaagttcaaaatcaccaactggtccacctacaacaaagctctcatcaaccgtggctccctcactttctggctggatgatggggcgattcaggcctggtatgagtcagcaacaccttcttcacgaggcagacctcagcgc

SEQ ID NO: 1212 - DNA, 5519 bp, Artificial Sequence
  source: /note="Description of Artificial Sequence: Synthetic polynucleotide"
agcgcccaatacgcaaaccgcctctccccgcgcgttggccgattcattaatgcagctggcacgacaggtttcccgactggaaagcgggcagtgagcgcaacgcaattaatgtgagttagctcactcattaggcaccccaggctttacactttatgcttccggctcgtatgttgtgtggaattgtgagcggataacaatttcacacaggaaacagctatgaccatgattacgccaagctatttaggtgacactatagaatactcaagctatgcatcaagcttggtaccgagctcggatccactagtaacggccgccagtgtgctggaattcgcccttttaagacccactttcacatttaagttgtttttctaatccgcagatgatcaattcaaggccgaataagaaggctggctctgcaccttggtgatcaaataattcgatagcttgtcgtaataatggcggcatactatcagtagtaggtgtttccctttcttctttagcgacttgatgctcttgatcttccaatacgcaacctaaagtaaaatgccccacagcgctgagtgcatataatgcattctctagtgaaaaaccttgttggcataaaaaggctaattgattttcgagagtttcatactgtttttctgtaggccgtgtacctaaatgtacttttgctccatcgcgatgacttagtaaagcacatctaaaacttttagcgttattacgtaaaaaatcttgccagctttccccttctaaagggcaaaagtgagtatggtgcctatctaacatctcaatggctaaggcgtcgagcaaagcccgcttattttttacatgccaatacaatgtaggctgctctacacctagcttctgggcgagtttacgggttgttaaaccttcgattccgacctcattaagcagctctaatgcgctgttaatcactttacttttatctaatctagacatcattaattcctaatttttgttgacactctatcattgatagagttattttaccactccctatcagtgatagagaaaatgaaaggaggtaaattatgagcaacaatgccttgcagactattattaacgctcgtcttcccggcgaagaaggtctgtggcaaatccatcttcaggatggtaagatttctgccattgatgcccaaagcggggtgatgccaatcacggaaaattcactggatgcagaacagggcttggtaattccgccttttgtagaaccacacatccatttggatactacccagacggcgggtcaacccaactggaaccagagcggtacgcttttcgaagggatcgagcgctgggccgaacgtaaagctcttttgacacatgacgacgtaaagcaacgcgcgtggcagacactgaaatggcaaattgccaatgggattcagcatgtacgcacgcacgtggacgttagcgacgcgaccctgaccgcattaaaggccatgttggaagtgaagcaagaagtggccccttggatcgatctgcaaattgtagcttttccacaagagggtatccttagctacccgaacggagaagctcttttagaggaagcgctgcgcttgggcgctgacgttgtcggtgctattcctcactttgagtttacacgcgagtatggagttgagtcgcttcataagacgttcgctttggcccagaaatacgaccgtttaattgacgtacattgcgatgagatcgacgacgagcaatcccgctttgtagaaacagtcgccgcgttggcgcatcacgaaggcatgggtgcgcgcgtaaccgcctcgcacactactgctatgcactcgtacaacggagcgtatactagccgcctgtttcgcttgctgaaaatgagtggcattaactttgttgccaacccattggtcaatatccatttgcaaggtcgtttcgatacatatccaaaacgtcgtggcatcacccgtgtcaaagagatgctggagtctggcattaatgtgtgttttggacatgacgatgtattcgatccatggtatccgcttggcacggctaacatgttacaagtgttgcacatggggttgcatgtgtgccagttaatgggctacggtcagatcaatgatggcttaaacttaatcacacaccactccgcgcgcactctgaatttgcaagactacggcatcgcagcaggtaactcggccaacctgatcatcttacccgcagaaaacggctttgatgctttgcgccgtcaggtgccggtccgctatagtgtgcgtggtgggaaggttatcgcgtccacccaaccagcacagaccactgtgtaccttgaacagcccgaagctatcgactacaaacgctaaaagggcgaattctgcagatatccatcacactggcggccgctcgagcatgcatctagagggcccaattcgccctatagtgagtcgtattacaattcactggccgtcgttttacaacgtcgtgactgggaaaaccctggcgttacccaacttaatcgccttgcagcacatccccctttcgccagctggcgtaatagcgaagaggcccgcaccgatcgcccttcccaacagttgcgcagcctatacgtacggcagtttaaggtttacacctataaaagagagagccgttatcgtctgtttgtggatgtacagagtgatattattgacacgccggggcgacggatggtgatccccctggccagtgcacgtctgctgtcagataaagtctcccgtgaactttacccggtggtgcatatcggggatgaaagctggcgcatgatgaccaccgatatggccagtgtgccggtctccgttatcggggaagaagtggctgatctcagccaccgcgaaaatgacatcaaaaacgccattaacctgatgttctggggaatataaatgtcaggcatgagattatcaaaaaggatcttcacctagatccttttcacgtagaaagccagtccgcagaaacggtgctgaccccggatgaatgtcagctactgggctatctggacaagggaaaacgcaagcgcaaagagaaagcaggtagcttgcagtgggcttacatggcgatagctagactgggcggttttatggacagcaagcgaaccggaattgccagctggggcgccctctggtaaggttgggaagccctgcaaagtaaactggatggctttctcgccgccaaggatctgatggcgcaggggatcaagctctgatcaagagacaggatgaggatcgtttcgcatgattgaacaagatggattgcacgcaggttctccggccgcttgggtggagaggctattcggctatgactgggcacaacagacaatcggctgctctgatgccgccgtgttccggctgtcagcgcaggggcgcccggttctttttgtcaagaccgacctgtccggtgccctgaatgaactgcaagacgaggcagcgcggctatcgtggctggccacgacgggcgttccttgcgcagctgtgctcgacgttgtcactgaagcgggaagggactggctgctattgggcgaagtgccggggcaggatctcctgtcatctcaccttgctcctgccgagaaagtatccatcatggctgatgcaatgcggcggctgcatacgcttgatccggctacctgcccattcgaccaccaagcgaaacatcgcatcgagcgagcacgtactcggatggaagccggtcttgtcgatcaggatgatctggacgaagagcatcaggggctcgcgccagccgaactgttcgccaggctcaaggcgagcatgcccgacggcgaggatctcgtcgtgacccatggcgatgcctgcttgccgaatatcatggtggaaaatggccgcttttctggattcatcgactgtggccggctgggtgtggcggaccgctatcaggacatagcgttggctacccgtgatattgctgaagagcttggcggcgaatgggctgaccgcttcctcgtgctttacggtatcgccgctcccgattcgcagcgcatcgccttctatcgccttcttgacgagttcttctgaattattaacgcttacaatttcctgatgcggtattttctccttacgcatctgtgcggtatttcacaccgcatacaggtggcacttttcggggaaatgtgcgcggaacccctatttgtttatttttctaaatacattcaaatatgtatccgctcatgagacaataaccctgataaatgcttcaataatagcacgtgaggagggccaccatggccaagttgaccagtgccgttccggtgctcaccgcgcgcgacgtcgccggagcggtcgagttctggaccgaccggctcgggttctcccgggacttcgtggaggacgacttcgccggtgtggtccgggacgacgtgaccctgttcatcagcgcggtccaggaccaggtggtgccggacaacaccctggcctgggtgtgggtgcgcggcctggacgagctgtacgccgagtggtcggaggtcgtgtccacgaacttccgggacgcctccgggccggccatgaccgagatcggcgagcagccgtgggggcgggagttcgccctgcgcgacccggccggcaactgcgtgcacttcgtggccgaggagcaggactgacacgtgctaaaacttcatttttaatttaaaaggatctaggtgaagatcctttttgataatctcatgaccaaaatcccttaacgtgagttttcgttccactgagcgtcagaccccgtagaaaagatcaaaggatcttcttgagatcctttttttctgcgcgtaatctgctgcttgcaaacaaaaaaaccaccgctaccagcggtggtttgtttgccggatcaagagctaccaactctttttccgaaggtaactggcttcagcagagcgcagataccaaatactgtccttctagtgtagccgtagttaggccaccacttcaagaactctgtagcaccgcctacatacctcgctctgctaatcctgttaccagtggctgctgccagtggcgataagtcgtgtcttaccgggttggactcaagacgatagttaccggataaggcgcagcggtcgggctgaacggggggttcgtgcacacagcccagcttggagcgaacgacctacaccgaactgagatacctacagcgtgagctatgagaaagcgccacgcttcccgaagggagaaaggcggacaggtatccggtaagcggcagggtcggaacaggagagcgcacgagggagcttccagggggaaacgcctggtatctttatagtcctgtcgggtttcgccacctctgacttgagcgtcgatttttgtgatgctcgtcaggggggcggagcctatggaaaaacgccagcaacgcggcctttttacggttcctgggcttttgctggccttttgctcacatgttctttcctgcgttatcccctgattctgtggataaccgtattaccgcctttgagtgagctgataccgctcgccgcagccgaacgaccgagcgcagcgagtcagtgagcgaggaagcggaag

SEQ ID NO: 1213 - DNA, 1281 bp, Artificial Sequence
  source: /note="Description of Artificial Sequence: Synthetic polynucleotide"
atgagcaacaatgccttgcagactattattaacgctcgtcttcccggcgaagaaggtctgtggcaaatccatcttcaggatggtaagatttctgccattgatgcccaaagcggggtgatgccaatcacggaaaattcactggatgcagaacagggcttggtaattccgccttttgtagaaccacacatccatttggatactacccagacggcgggtcaacccaactggaaccagagcggtacgcttttcgaagggatcgagcgctgggccgaacgtaaagctcttttgacacatgacgacgtaaagcaacgcgcgtggcagacactgaaatggcaaattgccaatgggattcagcatgtacgcacgcacgtggacgttagcgacgcgaccctgaccgcattaaaggccatgttggaagtgaagcaagaagtggccccttggatcgatctgcaaattgtagcttttccacaagagggtatccttagctacccgaacggagaagctcttttagaggaagcgctgcgcttgggcgctgacgttgtcggtgctattcctcactttgagtttacacgcgagtatggagttgagtcgcttcataagacgttcgctttggcccagaaatacgaccgtttaattgacgtacattgcgatgagatcgacgacgagcaatcccgctttgtagaaacagtcgccgcgttggcgcatcacgaaggcatgggtgcgcgcgtaaccgcctcgcacactactgctatgcactcgtacaacggagcgtatactagccgcctgtttcgcttgctgaaaatgagtggcattaactttgttgccaacccattggtcaatatccatttgcaaggtcgtttcgatacatatccaaaacgtcgtggcatcacccgtgtcaaagagatgctggagtctggcattaatgtgtgttttggacatgacgatgtattcgatccatggtatccgcttggcacggctaacatgttacaagtgttgcacatggggttgcatgtgtgccagttaatgggctacggtcagatcaatgatggcttaaacttaatcacacaccactccgcgcgcactctgaatttgcaagactacggcatcgcagcaggtaactcggccaacctgatcatcttacccgcagaaaacggctttgatgctttgcgccgtcaggtgccggtccgctatagtgtgcgtggtgggaaggttatcgcgtccacccaaccagcacagaccactgtgtaccttgaacagcccgaagctatcgactacaaacgc

SEQ ID NO: 1214 - DNA, 4894 bp, Artificial Sequence
  source: /note="Description of Artificial Sequence: Synthetic polynucleotide"
tagcggagtgtatactggcttactatgttggcactgatgagggtgtcagtgaagtgcttcatgtggcaggagaaaaaaggctgcaccggtgcgtcagcagaatatgtgatacaggatatattccgcttcctcgctcactgactcgctacgctcggtcgttcgactgcggcgagcggaaatggcttacgaacggggcggagatttcctggaagatgccaggaagatacttaacagggaagtgagagggccgcggcaaagccgtttttccataggctccgcccccctgacaagcatcacgaaatctgacgctcaaatcagtggtggcgaaacccgacaggactataaagataccaggcgtttcccctggcggctccctcgtgcgctctcctgttcctgcctttcggtttaccggtgtcattccgctgttatggccgcgtttgtctcattccacgcctgacactcagttccgggtaggcagttcgctccaagctggactgtatgcacgaaccccccgttcagtccgaccgctgcgccttatccggtaactatcgtcttgagtccaacccggaaagacatgcaaaagcaccactggcagcagccactggtaattgatttagaggagttagtcttgaagtcatgcgccggttaaggctaaactgaaaggacaagttttggtgactgcgctcctccaagccagttacctcggttcaaagagttggtagctcagagaaccttcgaaaaaccgccctgcaaggcggttttttcgttttcagagcaagagattacgcgcagaccaaaacgatctcaagaagatcatcttattaaggggtctgacgctcagtggaacggtgcaccctgcagggctagctgataaagcgttcgcgctgcattcggcagtttaagacccactttcacatttaagttgtttttctaatccgcatatgatcaattcaaggccgaataagaaggctggctctgcaccttggtgatcaaataattcgatagcttgtcgtaataatggcggcatactatcagtagtaggtgtttccctttcttctttagcgacttgatgctcttgatcttccaatacgcaacctaaagtaaaatgccccacagcgctgagtgcatataatgcattctctagtgaaaaaccttgttggcataaaaaggctaattgattttcgagagtttcatactgtttttctgtaggccgtgtacctaaatgtacttttgctccatcgcgatgacttagtaaagcacatctaaaacttttagcgttattacgtaaaaaatcttgccagctttccccttctaaagggcaaaagtgagtatggtgcctatctaacatctcaatggctaaggcgtcgagcaaagcccgcttattttttacatgccaatacaatgtaggctgctctacacctagcttctgggcgagtttacgggttgttaaaccttcgattccgacctcattaagcagctctaatgcgctgttaatcactttacttttatctaatctagacatcattaattcctaatttttgttgacactctatcattgatagagttattttaccactccctatcagtgatagagaaaagtgaacttcacttattagggaggaaagaatatgtcaaataacgctctgcagactattataaatgctcgattgccaggggaagaggggttgtggcaaattcaccttcaggatgggaagatctctgcgatagatgcgcagtcgggcgtgatgccaatcactgaaaactctctcgacgcggaacagggcctggttattcctccgtttgttgagccacacattcaccttgatactacgcagacggcaggtcagcccaattggaatcagtctggtaccttgtttgaggggatagagcggtgggccgaacgtaaggcattgctgacccacgatgatgtcaaacagcgcgcttggcagactttaaagtggcaaattgcgaatggcatccagcatgttagaacacacgtggatgtgtcggatgctactctgacggctctgaaagcgatgcttgaagttaagcaggaggttgccccgtggatcgatctgcaaattgttgcattcccgcaggagggcatcctcagctatccgaacggtgaggcgcttctcgaagaagctctcagacttggagcggacgttgtgggcgcgatcccgcatttcgaattcactcgcgagtacggtgtggaatcacttcacaaaacctttgcgctggcacagaagtatgaccgacttattgatgtacattgcgatgaaatagatgatgagcagtccagattcgttgaaaccgttgcagcgttggctcatcacgagggcatgggcgcacgcgtcactgcctcccacacgaccgcgatgcattcgtataacggtgcatacacctcacgcctgtttcggctgttaaaaatgagcggaataaacttcgtcgctaatccattggttaatattcatttgcagggtcgctttgatacgtatccaaaaagacgcggcataacgcgagtcaaagaaatgctggagagtggtatcaatgtgtgctttggccacgatgatgttttcgatccctggtatccgcttggaacggcgaatatgcttcaggttctgcacatggggctgcacgtgtgccagctgatgggttacggacaaattaacgatggcctgaatctcatcacccatcattctgcccgaactcttaacctgcaggattatggaattgcggcgggcaattctgctaatctgataatactgcctgctgaaaacggtttcgacgcgctccgccgacaagtgcccgttcgttacagtgttcgaggcggcaaagtcatcgcgtcaactcaaccagctcaaactactgtatatctggaacagcccgaagctattgactacaaacgaggctcagattataaggacgatgatgataaaggtagcaaaatagttgaagttaaacatcccctcgttaaacacaaactgggcttgatgcgcgaacaggacatatcgaccaaacgcttccgtgaactggcttcagaagtgggctcactactgacgtatgaagcaaccgcagatcttgagacagaaaaagtaactattgaaggctggaatggccccgtagagatagatcagatcaaaggtaaaaaaattacggtcgttccgattttgcgcgccgggctgggcatgatggatggagtgttagaaaacgtcccatccgcccggatctcggtggtcggaatgtaccgcaacgaagagacgcttgaaccagtcccttacttccagaagttggttagtaacatagacgaacgaatggccttaatagtagatccgatgctcgcgactggcggcagcgtgatcgctacgattgatctgttgaaaaaagcggggtgtagttctatcaaagttctggttctcgtcgcggcgccagaaggtattgccgcgttagaaaaagcacatccggacgtcgaactgtacactgcatctattgaccagggattgaacgagcatggatatataattccgggcttgggcgatgcgggagataaaatcttcggtactaagtaaggaggaacgattggtaaacccggtgaacgcatgagaaagcccccggaagatcaccttccgggggcttttttattgcgcggaccaaaacgaaaaaagacgctcgaaagcgtctcttttctggaatttggtaccgaggcgtaatgctctgccagtgttacaaccaattaaccaattctgattagaaaaactcatcgagcatcaaatgaaactgcaatttattcatatcaggattatcaataccatatttttgaaaaagccgtttctgtaatgaaggagaaaactcaccgaggcagttccataggatggcaagatcctggtatcggtctgcgattccgactcgtccaacatcaatacaacctattaatttcccctcgtcaaaaataaggttatcaagtgagaaatcaccatgagtgacgactgaatccggtgagaatggcaaaagcttatgcatttctttccagacttgttcaacaggccagccattacgctcgtcatcaaaatcactcgcatcaaccaaaccgttattcattcgtgattgcgcctgagcgagacgaaatacgcgatcgctgttaaaaggacaattacaaacaggaatcgaatgcaaccggcgcaggaacactgccagcgcatcaacaatattttcacctgaatcaggatattcttctaatacctggaatgctgttttcccggggatcgcagtggtgagtaaccatgcatcatcaggagtacggataaaatgcttgatggtcggaagaggcataaattccgtcagccagtttagtctgaccatctcatctgtaacatcattggcaacgctacctttgccatgtttcagaaacaactctggcgcatcgggcttcccatacaatcgatagattgtcgcacctgattgcccgacattatcgcgagcccatttatacccatataaatcagcatccatgttggaatttaatcgcggcctcgagcaagacgtttcccgttgaatatggctcataacaccccttgtattactgtttatgtaagcagacagttttattgttcatgatgatatatttttatcttgtgcaatgtaacatcagagattttgagacacaacgtggctttgttgaataaatcgaacttttgctgagttgaaggatcagatcacgcatcttcccgacaacgcagaccgttccgtggcaaagcaaaagttcaaaatcaccaactggtccacctacaacaaagctctcatcaaccgtggctccctcactttctggctggatgatggggcgattcaggcctggtatgagtcagcaacaccttcttcacgaggcagacctcagcgc

SEQ ID NO: 1215 - DNA, 1941 bp, Artificial Sequence
  source: /note="Description of Artificial Sequence: Synthetic polynucleotide"
atgtcaaataacgctctgcagactattataaatgctcgattgccaggggaagaggggttgtggcaaattcaccttcaggatgggaagatctctgcgatagatgcgcagtcgggcgtgatgccaatcactgaaaactctctcgacgcggaacagggcctggttattcctccgtttgttgagccacacattcaccttgatactacgcagacggcaggtcagcccaattggaatcagtctggtaccttgtttgaggggatagagcggtgggccgaacgtaaggcattgctgacccacgatgatgtcaaacagcgcgcttggcagactttaaagtggcaaattgcgaatggcatccagcatgttagaacacacgtggatgtgtcggatgctactctgacggctctgaaagcgatgcttgaagttaagcaggaggttgccccgtggatcgatctgcaaattgttgcattcccgcaggagggcatcctcagctatccgaacggtgaggcgcttctcgaagaagctctcagacttggagcggacgttgtgggcgcgatcccgcatttcgaattcactcgcgagtacggtgtggaatcacttcacaaaacctttgcgctggcacagaagtatgaccgacttattgatgtacattgcgatgaaatagatgatgagcagtccagattcgttgaaaccgttgcagcgttggctcatcacgagggcatgggcgcacgcgtcactgcctcccacacgaccgcgatgcattcgtataacggtgcatacacctcacgcctgtttcggctgttaaaaatgagcggaataaacttcgtcgctaatccattggttaatattcatttgcagggtcgctttgatacgtatccaaaaagacgcggcataacgcgagtcaaagaaatgctggagagtggtatcaatgtgtgctttggccacgatgatgttttcgatccctggtatccgcttggaacggcgaatatgcttcaggttctgcacatggggctgcacgtgtgccagctgatgggttacggacaaattaacgatggcctgaatctcatcacccatcattctgcccgaactcttaacctgcaggattatggaattgcggcgggcaattctgctaatctgataatactgcctgctgaaaacggtttcgacgcgctccgccgacaagtgcccgttcgttacagtgttcgaggcggcaaagtcatcgcgtcaactcaaccagctcaaactactgtatatctggaacagcccgaagctattgactacaaacgaggctcagattataaggacgatgatgataaaggtagcaaaatagttgaagttaaacatcccctcgttaaacacaaactgggcttgatgcgcgaacaggacatatcgaccaaacgcttccgtgaactggcttcagaagtgggctcactactgacgtatgaagcaaccgcagatcttgagacagaaaaagtaactattgaaggctggaatggccccgtagagatagatcagatcaaaggtaaaaaaattacggtcgttccgattttgcgcgccgggctgggcatgatggatggagtgttagaaaacgtcccatccgcccggatctcggtggtcggaatgtaccgcaacgaagagacgcttgaaccagtcccttacttccagaagttggttagtaacatagacgaacgaatggccttaatagtagatccgatgctcgcgactggcggcagcgtgatcgctacgattgatctgttgaaaaaagcggggtgtagttctatcaaagttctggttctcgtcgcggcgccagaaggtattgccgcgttagaaaaagcacatccggacgtcgaactgtacactgcatctattgaccagggattgaacgagcatggatatataattccgggcttgggcgatgcgggagataaaatcttcggtactaagtaa

SEQ ID NO: 1216 - protein, 427 aa, Artificial Sequence
  source: /note="Description of Artificial Sequence: Synthetic polypeptide"
MSNNALQTIINARLPGEEGLWQIHLQDGKISAIDAQSGVMPITENSLDAEQGLVIPPFVEPHIHLDTTQTAGQPNWNQSGTLFEGIERWAERKALLTHDDVKQRAWQTLKWQIANGIQHVRTHVDVSDATLTALKAMLEVKQEVAPWIDLQIVAFPQEGILSYPNGEALLEEALRLGADVVGAIPHFEFTREYGVESLHKTFALAQKYDRLIDVHCDEIDDEQSRFVETVAALAHHEGMGARVTASHTTAMHSYNGAYTSRLFRLLKMSGINFVANPLVNIHLQGRFDTYPKRRGITRVKEMLESGINVCFGHDDVFDPWYPLGTANMLQVLHMGLHVCQLMGYGQINDGLNLITHHSARTLNLQDYGIAAGNSANLIILPAENGFDALRRQVPVRYSVRGGKVIASTQPAQTTVYLEQPEAIDYKR

SEQ ID NO: 1217 - protein, 646 aa, Artificial Sequence
  source: /note="Description of Artificial Sequence: Synthetic polypeptide"
MSNNALQTIINARLPGEEGLWQIHLQDGKISAIDAQSGVMPITENSLDAEQGLVIPPFVEPHIHLDTTQTAGQPNWNQSGTLFEGIERWAERKALLTHDDVKQRAWQTLKWQIANGIQHVRTHVDVSDATLTALKAMLEVKQEVAPWIDLQIVAFPQEGILSYPNGEALLEEALRLGADVVGAIPHFEFTREYGVESLHKTFALAQKYDRLIDVHCDEIDDEQSRFVETVAALAHHEGMGARVTASHTTAMHSYNGAYTSRLFRLLKMSGINFVANPLVNIHLQGRFDTYPKRRGITRVKEMLESGINVCFGHDDVFDPWYPLGTANMLQVLHMGLHVCQLMGYGQINDGLNLITHHSARTLNLQDYGIAAGNSANLIILPAENGFDALRRQVPVRYSVRGGKVIASTQPAQTTVYLEQPEAIDYKRGSDYKDDDDKGSKIVEVKHPLVKHKLGLMREQDISTKRFRELASEVGSLLTYEATADLETEKVTIEGWNGPVEIDQIKGKKITVVPILRAGLGMMDGVLENVPSARISVVGMYRNEETLEPVPYFQKLVSNIDERMALIVDPMLATGGSVIATIDLLKKAGCSSIKVLVLVAAPEGIAALEKAHPDVELYTASIDQGLNEHGYIIPGLGDAGDKIFGTK

SEQ ID NO: 1218 - protein, 52 aa, Artificial Sequence
  source: /note="Description of Artificial Sequence: Synthetic polypeptide"
MKRHLNTSYRLVWNHITGAFVVASELARARGKRAGVAVALSLAAATSLPALA

SEQ ID NO: 1219 - protein, 53 aa, Artificial Sequence
  source: /note="Description of Artificial Sequence: Synthetic polypeptide"
MNKIFKVIWNPATGSYTVASETAKSRGKKSGRSKLLISALVAGGLLSSFGASA

SEQ ID NO: 1220 - protein, 22 aa, Artificial Sequence
  source: /note="Description of Artificial Sequence: Synthetic peptide"
MQLRKPATAILALALSAGLAQA

SEQ ID NO: 1221 - protein, 40 aa, Artificial Sequence
  source: /note="Description of Artificial Sequence: Synthetic polypeptide"
MFWRDMTLSVWRKKTTGLKTKKRLLALVLAAALCSSPVWA

SEQ ID NO: 1222 - DNA, 159 bp, Artificial Sequence
  source: /note="Description of Artificial Sequence: Synthetic polynucleotide"
atgaacaagattttcaaggttatctggaaccccgcgacaggcagctacactgtggcctccgaaaccgctaagtcgcgcggcaagaagtcaggacgttcaaagctgcttatttctgctttagtagccggaggattactttctagctttggagcctcggca

SEQ ID NO: 1223 - DNA, 57 bp, Artificial Sequence
  source: /note="Description of Artificial Sequence: Synthetic oligonucleotide"
atgaaaaaaatctggctggcattagcaggcttagtcctggcctttagtgcctcggca

SEQ ID NO: 1224 - DNA, 66 bp, Artificial Sequence
  source: /note="Description of Artificial Sequence: Synthetic oligonucleotide"
atgcagttgcgcaagcctgccacggcaattttagcattagctctttctgcgggcttggcccaggca

SEQ ID NO: 1225 - DNA, 120 bp, Artificial Sequence
  source: /note="Description of Artificial Sequence: Synthetic polynucleotide"
atgttctggcgcgacatgacactgagcgtttggcgtaaaaaaacaacgggactgaaaaccaaaaagcgtttgttagcccttgtcctggcggcagccctgtgctcgtccccggtatgggca

SEQ ID NO: 1226 - DNA, 99 bp, Artificial Sequence
  source: /note="Description of Artificial Sequence: Synthetic oligonucleotide"
atgggatacaagatgaacatttcatcacttcgcaaagcttttatcttcatgggtgccgttgctgctctgtcactggtcaatgctcaatcggccctggca

SEQ ID NO: 1227 - DNA, 78 bp, Artificial Sequence
  source: /note="Description of Artificial Sequence: Synthetic oligonucleotide"
atgaagattaaaacaggcgctcgtattttggccctgtctgcgcttacgactatgatgtttagtgcctcggccctggca

SEQ ID NO: 1228 - DNA, 78 bp, Artificial Sequence
  source: /note="Description of Artificial Sequence: Synthetic oligonucleotide"
atgacgaatatcactaaacgtagccttgtggccgcgggggtcttggctgcattgatggctggcaatgttgctctggca

SEQ ID NO: 1229 - DNA, 66 bp, Artificial Sequence
  source: /note="Description of Artificial Sequence: Synthetic oligonucleotide"
atgaaatatctgttgcccacggctgccgcgggtctgctgctgctggcagcgcaaccggctatggca

SEQ ID NO: 1230 - DNA, 63 bp, Artificial Sequence
  source: /note="Description of Artificial Sequence: Synthetic oligonucleotide"
atgaagcaaagtacgatcgcccttgcgctgttgccccttcttttcacgcccgtcaccaaggca

SEQ ID NO: 1231 - protein, 343 aa, Homo sapiens
EEELQVIQPDKSVLVAAGETATLRCTATSLIPVGPIQWFRGAGPGRELIYNQKEGHFPRVTTVSDLTKRNNMDFSIRIGNITPADAGTYYCVKFRKGSPDDVEFKSGAGTELSVRAKPSAPVVSGPAARATPQHTVSFTCESHGFSPRDITLKWFKNGNELSDFQTNVDPVGESVSYSIHSTAKVVLTREDVHSQVICEVAHVTLQGDPLRGTANLSETIRVPPTLEVTQQPVRAENQVNVTCQVRKFYPQRLQLTWLENGNVSRTETASTVTENKDGTYNWMSWLLVNVSAHRDDVKLTCQVEHDGQPAVSKSHDLKVSAHPKEQGSNTAAENTGSNERNIY

SEQ ID NO: 1232 - DNA, 342 bp, Artificial Sequence
  source: /note="Description of Artificial Sequence: Synthetic polynucleotide"
aactgggtgaatgtcatctcggacttaaagaagattgaagacttgattcagagcatgcatatcgacgcgactttatacaccgagtctgacgtacacccaagttgcaaggtcaccgccatgaagtgcttcttgcttgagttacaagtcatcagtttggaatctggagacgctagtattcacgatacggtggaaaacctgatcatccttgcaaatgactctctttcatccaatggtaatgttactgagtcggggtgcaaagaatgtgaagaacttgaggagaagaacattaaggaatttcttcagtcattcgtgcatatcgtacagatgttcatcaacacctct

SEQ ID NO: 1233 - DNA, 60 bp, Artificial Sequence
  source: /note="Description of Artificial Sequence: Synthetic oligonucleotide"
tccggagggagcggcggcgggggtagtggaggcgggtcaggcggcgggggctcacttcag

SEQ ID NO: 1234 - DNA, 36 bp, Artificial Sequence
  source: /note="Description of Artificial Sequence: Synthetic oligonucleotide"
gattataaagacgatgacgataagatcgaaggacgt

SEQ ID NO: 1235 - DNA, 1791 bp, Artificial Sequence
  source: /note="Description of Artificial Sequence: Synthetic polynucleotide"
atggggtacaaaatgaacattagctcgcttcgcaaagcattcatttttatgggggctgttgcagctttaagccttgtcaatgcccagtcagcgcttgccgtcgactataaggatgacgacgacaagcaattgggcggtggcatctgggagcttaagaaggacgtgtatgtagtggagttagactggtatccagatgcccccggagagatggtggtcttaacatgtgacactccagaggaggacgggattacctggacacttgaccagtcaagcgaggtattgggttctggaaagacgcttactattcaagtcaaagaatttggggatgccgggcagtatacatgtcacaagggcggcgaagttctgtcgcactccttacttttgttacacaaaaaagaagacggcatttggtccacagacatccttaaggaccaaaaggagccgaagaataagacgtttctgcgctgtgaagcgaagaactatagtggtcgctttacttgctggtggttgacgaccatttccactgatttaaccttttcggtaaagagttctcgcgggagttccgacccacagggcgtgacttgtggcgcagccacactttcggcggaacgcgttcgtggggacaataaggaatacgaatattcggtcgagtgtcaggaagattcagcttgccctgccgctgaggagtcacttccgattgaagtgatggttgacgccgtgcacaaattaaagtatgaaaattacacgtcatctttctttatccgtgacattattaagcccgacccgccaaagaatctgcagcttaaacccctgaagaacagccgccaggtggaagtaagctgggaatatcctgacacctggtccactccgcattcgtatttctcgttgacgttttgtgttcaggtgcagggaaagagcaagcgcgaaaagaaggatcgcgtctttacagacaaaacgtccgcgacggttatttgtcgtaagaatgctagtatctctgttcgcgctcaggaccgttattactcatctagttggtcggagtgggcctcggttccctgctctgggggtggaggatcgggtggaggtggctcgggaggtggcggctcccgtaatttaccggtggctactcctgacccagggatgttcccgtgcttgcaccatagccaaaacttacttcgcgctgtcagcaacatgcttcagaaagcacgtcaaacgcttgagttttacccgtgtactagcgaagagatcgatcacgaggacattaccaaagacaaaacctccaccgtcgaggcctgccttccacttgaactgacgaaaaatgagtcatgcttaaattctcgtgaaacctccttcattactaacggatcgtgcctggcctcgcgcaagacttcgttcatgatggcattatgcttgtcgtctatttatgaagaccttaaaatgtatcaagtggagttcaagacgatgaatgcaaaacttcttatggacccgaagcgtcaaatcttcttagaccaaaacatgttggccgtgatcgatgaactgatgcaagccttgaattttaattcggaaactgtaccgcaaaaatcttctcttgaagaaccggatttctataagaccaaaattaaactttgtattttacttcacgctttccgcatccgtgcagtaactatcgaccgcgtaatgagttaccttaacgcctcgggtggcgagctcggtggcagtggtaagcctatccctaaccctctcctcggcctcgattctacgggatccggtcatcaccaccatcaccatcaccat

SEQ ID NO: 1236 - protein, 69 aa, Artificial Sequence
  source: /note="Description of Artificial Sequence: Synthetic polypeptide"
ITCPPPMSVEHADIWVKSYSLYSRERYICNSGFKRKAGTSSLTECVLNKATNVAHWTTPSLKCIRDPAL

SEQ ID NO: 1237 - DNA, 72 bp, Artificial Sequence; identical to SEQ ID NO: 1141
  source: /note="Description of Artificial Sequence: Synthetic oligonucleotide"

SEQ ID NO: 1238 - protein, 18 aa, Artificial Sequence
  source: /note="Description of Artificial Sequence: Synthetic peptide"
KESGSVSSEQLAQFRSLD

SEQ ID NO: 1239 - protein, 14 aa, Artificial Sequence
  source: /note="Description of Artificial Sequence: Synthetic peptide"
EGKSSGSGSESKST

SEQ ID NO: 1240 - protein, 8 aa, Artificial Sequence
  source: /note="Description of Artificial Sequence: Synthetic peptide"
GGGGGGGG

SEQ ID NO: 1241 - protein, 12 aa, Artificial Sequence
  source: /note="Description of Artificial Sequence: Synthetic peptide"
GSAGSAAGSGEF

SEQ ID NO: 1242 - protein, 30 aa, Artificial Sequence
  source: /note="Description of Artificial Sequence: Synthetic polypeptide"
  MISC_FEATURE (1)..(30): /note="This sequence may encompass 1-6 'Gly Gly Gly Gly Ser' repeating units"
GGGGSGGGGSGGGGSGGGGSGGGGSGGGGS

SEQ ID NO: 1243 - protein, 16 aa, Artificial Sequence
  source: /note="Description of Artificial Sequence: Synthetic peptide"
SGGGGSGGGGSGGGGS

SEQ ID NO: 1244 - protein, 9 aa, Artificial Sequence
  source: /note="Description of Artificial Sequence: Synthetic peptide"
GGGGSGGGS

SEQ ID NO: 1245 - protein, 5 aa, Artificial Sequence
  source: /note="Description of Artificial Sequence: Synthetic peptide"
GGGGS

SEQ ID NO: 1246 - DNA, 18 bp, Artificial Sequence
  source: /note="Description of Artificial Sequence: Synthetic oligonucleotide"
  modified_base (2)..(2): a, c, t, g, unknown or other
  modified_base (17)..(17): a, c, t, g, unknown or other
wntgaatwwwwattcanw

SEQ ID NO: 1247 - protein, 15 aa, Artificial Sequence
  source: /note="Description of Artificial Sequence: Synthetic peptide"
GGGGSGGGGSGGGGS

SEQ ID NO: 1248 - protein, 6 aa, Artificial Sequence
  source: /note="Description of Artificial Sequence: Synthetic peptide"
  MOD_RES (6)..(6): 1,3 dimethyl-His
CAVAYH

SEQ ID NO: 1249 - DNA, 18 bp, Artificial Sequence
  source: /note="Description of Artificial Sequence: Synthetic oligonucleotide"
ttgttgayryrtcaacwa

SEQ ID NO: 1250 - DNA, 24 bp, Artificial Sequence
  source: /note="Description of Artificial Sequence: Synthetic oligonucleotide"
ggaaaatttttttaaaaaaaaaac

SEQ ID NO: 1251 - protein, 8 aa, Artificial Sequence
  source: /note="Description of Artificial Sequence: Synthetic peptide"
AGYGSTLT

SEQ ID NO: 1252 - protein, 6 aa, Artificial Sequence
  source: /note="Description of Artificial Sequence: Synthetic 6xHis tag"
HHHHHH

SEQ ID NO: 1253 - DNA, 57 bp, Artificial Sequence
  source: /note="Description of Artificial Sequence: Synthetic oligonucleotide"
atgaagaaaatttggctggcacttgccggtttggtattagcgttttccgcctcggca

SEQ ID NO: 1254 - protein, 522 aa, Homo sapiens
MQPWHGKAMQRASEAGATAPKASARNARGAPMDPTESPAAPEAALPKAGKFGPARKSGSRQKKSAPDTQERPPVRATGARAKKAPQRAQDTQPSDATSAPGAEGLEPPAAREPALSRAGSCRQRGARCSTKPRPPPGPWDVPSPGLPVSAPILVRRDAAPGASKLRAVLEKLKLSRDDISTAAGMVKGVVDHLLLRLKCDSAFRGVGLLNTGSYYEHVKISAPNEFDVMFKLEVPRIQLEEYSNTRAYYFVKFKRNPKENPLSQFLEGEILSASKMLSKFRKIIKEEINDIKDTDVIMKRKRGGSPAVTLLISEKISVDITLALESKSSWPASTQEGLRIQNWLSAKVRKQLRLKPFYLVPKHAKEGNGFQEETWRLSFSHIEKEILNNHGKSKTCCENKEEKCCRKDCLKLMKYLLEQLKERFKDKKHLDKFSSYHVKTAFFHVCTQNPQDSQWDRKDLGLCFDNCVTYFLQCLRTEKLENYFIPEFNLFSSNLIDKRSKEFLTKQIEYERNNEFPVFDEF

SEQ ID NO: 1255 - DNA, 1569 bp, Homo sapiens
atgcaaccatggcatggtaaggcaatgcaacgtgcatctgaggctggagctaccgcgcccaaagcttcagcacggaacgcgcgcggtgctccgatggatccgacggagagccctgctgcaccggaagccgctctgccaaaagcgggtaaattcgggccggcgcggaaatcaggctcacgccagaaaaagagtgctccggatacacaggaacgtccgcctgtaagagctaccggcgcgcgcgctaaaaaagcccctcagcgtgcgcaggatacccaaccatcggatgcaacgagcgcaccgggggcggagggccttgagcctcctgctgcgcgtgagccggccctctctcgcgcagggagttgccgccaacgaggcgcacgctgctcgacgaaaccgcggccccctccgggtccgtgggatgttccatcgccaggcctgccggtttctgcgcctattctcgttcgccgcgacgcggctcctggcgcttcgaaactgagagctgtcttagagaaactgaaactctcgcgggatgatatatctactgcggcagggatggtcaaaggtgttgtggatcatctcctgttacgtcttaagtgcgattcggccttccgaggtgttggccttttaaacactgggtcatactatgagcacgttaagatcagcgcgccgaacgagttcgacgttatgtttaagcttgaagtccctcgcatacagctggaagaatactccaatacacgagcatattattttgttaaattcaaacgaaaccccaaagagaaccctctttcacagtttctggagggagaaattctgtctgcgagtaagatgctctcgaagttccgaaaaatcattaaagaggaaatcaacgacatcaaagacactgatgttatcatgaagaggaaacgtgggggctcaccggcggtaacactgctgatttcggaaaagatctcagttgatattactttggcgctcgaatcaaaatcatcgtggccggcgagtacacaggaagggctccgtattcagaattggctgtctgcgaaagtccgcaaacaactgcgtttgaaaccattttatttagtgccaaaacacgcgaaagaaggcaacggtttccaggaggagacgtggcgactgtcatttagccacatagaaaaggaaatattaaataatcacgggaaaagtaagacgtgctgcgagaataaagaagagaagtgctgcaggaaagattgtctgaaactgatgaaatacctgttggagcagctgaaagagaggtttaaagataagaagcatctggacaaattttcttcatatcacgttaaaaccgcattcttccacgtatgcacacagaatccgcaggactcacagtgggatcggaaagatctgggcctgtgctttgacaactgcgtcacatatttcttgcagtgcttgaggactgaaaaattggaaaactacttcattcccgagttcaatttattcagtagtaacctgatcgacaagcgtagcaaagaattcctgacgaagcagatcgaatacgaaagaaataacgaattcccggtgtttgatgaattttaa

SEQ ID NO: 1256 - DNA, 1594 bp, Artificial Sequence
  source: /note="Description of Artificial Sequence: Synthetic polynucleotide"
acctattggtataaggaggtaaataatgcaaccatggcatggtaaggcaatgcaacgtgcatctgaggctggagctaccgcgcccaaagcttcagcacggaacgcgcgcggtgctccgatggatccgacggagagccctgctgcaccggaagccgctctgccaaaagcgggtaaattcgggccggcgcggaaatcaggctcacgccagaaaaagagtgctccggatacacaggaacgtccgcctgtaagagctaccggcgcgcgcgctaaaaaagcccctcagcgtgcgcaggatacccaaccatcggatgcaacgagcgcaccgggggcggagggccttgagcctcctgctgcgcgtgagccggccctctctcgcgcagggagttgccgccaacgaggcgcacgctgctcgacgaaaccgcggccccctccgggtccgtgggatgttccatcgccaggcctgccggtttctgcgcctattctcgttcgccgcgacgcggctcctggcgcttcgaaactgagagctgtcttagagaaactgaaactctcgcgggatgatatatctactgcggcagggatggtcaaaggtgttgtggatcatctcctgttacgtcttaagtgcgattcggccttccgaggtgttggccttttaaacactgggtcatactatgagcacgttaagatcagcgcgccgaacgagttcgacgttatgtttaagcttgaagtccctcgcatacagctggaagaatactccaatacacgagcatattattttgttaaattcaaacgaaaccccaaagagaaccctctttcacagtttctggagggagaaattctgtctgcgagtaagatgctctcgaagttccgaaaaatcattaaagaggaaatcaacgacatcaaagacactgatgttatcatgaagaggaaacgtgggggctcaccggcggtaacactgctgatttcggaaaagatctcagttgatattactttggcgctcgaatcaaaatcatcgtggccggcgagtacacaggaagggctccgtattcagaattggctgtctgcgaaagtccgcaaacaactgcgtttgaaaccattttatttagtgccaaaacacgcgaaagaaggcaacggtttccaggaggagacgtggcgactgtcatttagccacatagaaaaggaaatattaaataatcacgggaaaagtaagacgtgctgcgagaataaagaagagaagtgctgcaggaaagattgtctgaaactgatgaaatacctgttggagcagctgaaagagaggtttaaagataagaagcatctggacaaattttcttcatatcacgttaaaaccgcattcttccacgtatgcacacagaatccgcaggactcacagtgggatcggaaagatctgggcctgtgctttgacaactgcgtcacatatttcttgcagtgcttgaggactgaaaaattggaaaactacttcattcccgagttcaatttattcagtagtaacctgatcgacaagcgtagcaaagaattcctgacgaagcagatcgaatacgaaagaaataacgaattcccggtgtttgatgaattttaa

SEQ ID NO: 1257 - protein, 273 aa, Listeria monocytogenes; identical to SEQ ID NO: 1209

SEQ ID NO: 1258 - DNA, 822 bp, Listeria monocytogenes; identical to SEQ ID NO: 1210

SEQ ID NO: 1259 - DNA, 3787 bp, Artificial Sequence; identical to SEQ ID NO: 1211
  source: /note="Description of Artificial Sequence: Synthetic polynucleotide"

SEQ ID NO: 1260 - protein, 403 aa, Kingella denitrificans
MSDYTNNLHRVFVDQKIGFKKKITPTEQDLNFFNQVKKDVKSHLKTKIKEFLEQQGIANIAPKFRIQGSWAYGTCNLPAKQDQEMDFDYGVYLPVRAFEGFNPDAGASEQAQNYFEQVELMVEDLCHQHKWQLDTSAPSSCIRIKIRSNAHMDIPLYAVPDDMFDSLEERNELQVSLGTTTAIDKSLNYSEWALEDFNIRSFAEESLMDKNIRMIHMARRDGTWQKSDCELIRKWFADKLKSLENNGQQLRAICRYLKAWRDWQFADKSFQPSSILLMIIACKYYQYHQHRDDLALLSVLEKLPNALNDNVYENIEEHESEDFNRMEEYERVEASQYADALYQSFMASLNNLDKTKVLNFITNEWGDRIPQDENLIETSPQSIFDTPPLAQSNITQQVPLRQG

SEQ ID NO: 1261 - protein, 403 aa, Neisseria bacilliformis
MSHYTNNLHRIFVDREIGFKKEITPTELDLDFFNNVKKVVKSHLKTKIKEFLEQQGLASITPKFRIQGSWAYGTCNLPAKQGQEMDFDYGVYLPVRAFDGFNPDAGASEQAKNYFEQVELMMGDLCEQHDWLLDTSAPSSCIRIKIRNNAHMDIPLYAVPDDMFDSLEERNELQVSLGSATAIHESLNYSKWVFEDFNIRSFAEESLMDKNIRMIHMARRDGTWQESDCELIRKWFADKLKSLENNGQQLRAICRYLKAWRDWQFADKSFQPSSILLMIIACKYYQYYQHRDDLALLSVLEKLPNALSGNVYENIEEHESEDFNRMKEGERVEAMQYADALYQNFMASLNNFDKTKALKFITNEWGNRIPQDEDLIETSRQAIFDTPPLVQPNITPQAPLRQG

SEQ ID NO: 1262 - protein, 468 aa, Verminephrobacter eiseniae
MGQASKLFNGNTDQTLIGRVTPTTEQREFLQQQWNDLADHLKQALAKHGYTISTWLQGSYKYATLIKPVHLGEEYDVDVGLYFEWNDDQDAEPTPKQLRDWVQAELLEYEKACEELKKVEVPPKERCSRASYIQQFHIDTPVYHLNTDSDVRRLACLSGKWEHSDPKKLYKWFKEAVSGDDRDQLRRLVRYLKAWAAVSFDDAPGSRPSSIFLTVIATEAYQDLWAQRLLGLADDDALLAVIKKMHDRLFDDRKVENPVDKNEDLNRMTAEAWDGFLPRLAALQDIAERAGDAKDEASAALIWSEAFSFLMPLPETDQVEIVDEGSGRAVMQLPEIEVKVCTGTPPRPVATYRNEVPGVAKDCMLSFAIVNPHVVPEFATVEWTVRNEGQEADQRSDLGHRRVGMRLLSVEEHTAYVGRHFMDCVVRLNGQVYAVRRVPVTIRDVQHVARNPPRPPYTKLRSLFRRRR

SEQ ID NO: 1263 - DNA, 1213 bp, Kingella denitrificans
atgtcagactacactaataacttgcatcgcgtctttgttgaccaaaaaattgggttcaagaagaaaatcactcctaccgagcaagatctgaactttttcaatcaggtcaagaaagatgtaaagtcccaccttaagaccaaaatcaaggaatttcttgagcaacagggaatcgcgaacattgctccgaagttccgtattcagggatcgtgggcttacgggacatgtaatttgcccgcaaaacaggaccaggagatggatttcgattacggggtatatctgccagtacgtgccttcgaggggttcaacccagacgcaggcgcgtctgagcaggctcaaaactattttgaacaggtcgagttgatggttgaagatctgtgccaccagcataaatggcagctggacacgtctgccccttcgtcctgtatccgcattaaaattcgcagcaacgctcatatggacattcctttatatgccgtcccggatgatatgttcgattctcttgaagagcgcaatgagttacaagtatcactgggcacgacaacggctatcgataagtcactgaattacagcgagtgggcactggaggactttaatatccgctcattcgccgaagaaagtttaatggataagaacattcgcatgatccacatggcgcgtcgtgacgggacttggcaaaagtcggattgcgagctgattcgcaaatggttcgcagacaaactgaagagcttggagaataacgggcaacagctgcgtgcgatctgtcgttaccttaaggcgtggcgcgattggcaattcgctgacaagtcgtttcaaccatcctctatcttgttaatgattatcgcgtgcaaatattatcaataccatcaacaccgtgacgatttagcacttttatccgtgcttgaaaagttgccaaacgctttaaacgataatgtttatgagaatattgaagaacacgaatccgaagactttaaccgtatggaagagtatgaacgcgttgaggcgtcgcagtatgccgacgcgttgtaccagagtttcatggcctccttaaacaatttggacaaaactaaggttttaaattttatcactaatgagtggggggatcgcattccacaagacgagaacttaatcgagacatctcctcaatcaattttcgatactccccccttggcacaaagcaatatcacgcaacaagtgcccttgcgccagggttaas

SEQ ID NO: 1264 - DNA, 1212 bp, Neisseria bacilliformis
atgtctcactacaccaataatcttcatcgtatcttcgtagatcgtgaaattggttttaagaaagagattactccgacagagctggatcttgacttcttcaacaacgtcaaaaaagtagttaagagccaccttaaaaccaaaatcaaggagtttcttgaacagcaagggctggcgagtattactcctaagtttcgtatccagggaagctgggcgtacggaacatgtaaccttccagccaagcagggtcaggaaatggacttcgattatggcgtttatcttcctgtccgcgcctttgatggatttaatcctgatgcaggtgcctcagaacaagctaagaattacttcgaacaggtggagcttatgatgggtgacctgtgcgagcagcatgactggttgttggacacatccgcgccctcttcgtgtattcgcatcaaaatccgcaataatgcccatatggacattcctttatatgcagttccagacgatatgttcgatagcctggaggaacgtaacgaattacaggtttccttgggatcagcgacagctattcacgaatcgctgaattattcaaagtgggtttttgaggattttaacatccgctcttttgctgaggaatccctgatggacaaaaatatccgcatgatccacatggcccgccgtgacggaacttggcaggagtctgattgtgagttgattcgcaaatggtttgctgacaagttgaaatcccttgagaataatggtcagcagcttcgtgcaatttgtcgctatcttaaagcctggcgcgattggcaattcgcagataagtcttttcaaccctccagtatcctgttgatgatcattgcgtgtaagtactatcagtactaccaacatcgtgacgacctggcactgctgtccgtgctggagaaattgcccaacgctttgtctgggaacgtctatgagaatattgaggaacatgagtctgaggactttaaccgtatgaaagagggcgagcgtgtagaagcaatgcaatatgcggacgcgttataccaaaacttcatggcgtctcttaacaattttgataaaacgaaggcgctgaaattcatcactaatgaatggggaaatcgtatcccacaagatgaagacttaatcgaaacgtctcgtcaggcaatttttgacacaccacccttagttcaacccaacatcactccacaggccccacttcgccaggggtaa

SEQ ID NO: 1265 - DNA, 1407 bp, Verminephrobacter eiseniae
atgggacaggcgtctaagttatttaatggtaatacagatcaaactttaattggccgcgtgacgcccactaccgaacaacgcgagtttttacaacagcagtggaatgatctggcagatcacttgaagcaagccctggcaaaacacggttatacaatttcgacatggcttcagggttcttacaaatacgcgactcttattaagcctgtgcatctgggtgaagagtatgacgtagatgtagggttgtactttgagtggaacgatgaccaggatgcggagcccacgcctaagcagctgcgtgattgggtgcaagcggagttgttagagtatgagaaggcttgtgaggaacttaagaaagttgaggtgccgccgaaagaacgctgttctcgcgcatcatacatccaacaatttcacattgacacaccagtttatcatctgaacacggactccgacgtgcgccgtcttgcttgccttagtggaaagtgggagcattctgatccgaaaaagttatacaagtggtttaaagaagcagtatccggggatgatcgtgaccaattacgccgtcttgtacgttacttaaaggcctgggctgcggtttcctttgatgacgcaccgggatcccgcccatctagcatttttcttacggttattgctactgaagcctatcaggacttgtgggcacaacgtttactgggattagctgacgatgacgctttgctggcagtgattaaaaagatgcacgaccgccttttcgatgaccgcaaggtcgagaatcccgtagataaaaacgaagacttaaatcgcatgacggctgaagcgtgggacggttttctgccccgcttggcggcacttcaagacattgcggaacgcgccggagatgctaaggatgaggcgtcagccgcattgatctggagcgaagcgtttagttttttgatgcccttgccggaaactgatcaggtagaaatcgtagacgaaggctcaggccgtgccgtcatgcaattgccagaaattgaggtaaaggtctgcactggcacgccaccccgcccagtcgcaacgtatcgtaatgaggtcccaggagtagcaaaagactgcatgttgtcctttgcgattgtcaatccacatgtggttccggagtttgccacggtggagtggactgtgcgtaatgagggacaggaggcggaccagcgtagtgatttagggcaccgtcgcgtcgggatgcgtttgttgagtgtagaggaacatacggcatatgtcggtcgtcactttatggattgtgtagtccgtctgaacgggcaagtttacgctgtccgtcgcgtacccgttaccattcgcgacgttcagcacgtcgcccgcaatcccccacgtccaccttacacaaaactgcgcagtttattccgccgccgtcgctaa

SEQ ID NO: 1266 - DNA, 4045 bp, Artificial Sequence
  source: /note="Description of Artificial Sequence: Synthetic polynucleotide"
tagcggagtgtatactggcttactatgttggcactgatgagggtgtcagtgaagtgcttcatgtggcaggagaaaaaaggctgcaccggtgcgtcagcagaatatgtgatacaggatatattccgcttcctcgctcactgactcgctacgctcggtcgttcgactgcggcgagcggaaatggcttacgaacggggcggagatttcctggaagatgccaggaagatacttaacagggaagtgagagggccgcggcaaagccgtttttccataggctccgcccccctgacaagcatcacgaaatctgacgctcaaatcagtggtggcgaaacccgacaggactataaagataccaggcgtttcccctggcggctccctcgtgcgctctcctgttcctgcctttcggtttaccggtgtcattccgctgttatggccgcgtttgtctcattccacgcctgacactcagttccgggtaggcagttcgctccaagctggactgtatgcacgaaccccccgttcagtccgaccgctgcgccttatccggtaactatcgtcttgagtccaacccggaaagacatgcaaaagcaccactggcagcagccactggtaattgatttagaggagttagtcttgaagtcatgcgccggttaaggctaaactgaaaggacaagttttggtgactgcgctcctccaagccagttacctcggttcaaagagttggtagctcagagaaccttcgaaaaaccgccctgcaaggcggttttttcgttttcagagcaagagattacgcgcagaccaaaacgatctcaagaagatcatcttattaaggggtctgacgctcagtggaacggtgcaccctgcagggctagctgataaagcgttcgcgctgcattcggcagtacatgtctaacgtttgaattttgcgtaacgttcgcgagcaatctctaaagtgctattacgtacacgctcaaaacgttccttatccttctgccataacgaacgcaccgcaagaccacgcacgctgttaaaaatcaaccacaaaatgtcctcggcatcgtcacgggataatccacgcgacaccagaacgcccaaccacatatcctcgaccacaaaacggttgcgctctaccgtgcgttggataccctcacgcagagctggatcacgatcagcggccacaatcagatcaaggctaattgaaaagtcgtcatccaagaaaaactcagcggcatcatcaagcatttgctgaatcacatcatcttccggttttaacttagccaggcgagcacggctgcgctcggtgatctgctcatacagccactcaaacgtagcaagcaacagttctaatttggtgggaaaatggtgtgactgggcgccacgagacacccccgcggcgcccggtacatccgcaatacgaaaacccgcgtatcccttctcgcgtaatacaccaagcgccgccgcgatcagtttaccttgtgtttccatcgcacgttcggcttgagtacggcgcttgggcgacatgattaccatcttgcgaaacgatcctcatcctgtctcttgatcagatcttgatcccctgcgccatcagatccttggcggcaagaaagccatccagtttactttgcagggcttcccaaccttaccagagggcgccccagctggcaattccggacgcgttgcgcctagggggaatggtccatgcctgcagtaacaccgtgcgtgttgactattttacctctggcggtgataatggttgcaacaaacagacaatctggtctgtttgtattatgttaaccagcacactggcggccgcttactagaaataattttggccgcatcccacgctaactaatataaaggaggttttaaatggacttttccaacatgagtatccttcactatttagcgaatattgtagacattttggtggtttggttcgtaatttacaaggttatcatgcttattcgcggcacgaaagccgtccagctgttgaaggggattttcattattattgccgtcaagttacttagcggcttcttcggattgcagacagtggaatggattactgatcaaatgctgacttggggtttcttagccattatcattatctttcaaccggaattgcgtcgtgccctggagactttggggcgtggcaatatctttacccgctatggatcacgcattgagcgtgaacaacaccaccttattgagtctattgaaaagtccacgcaatacatggcgaagcgtcgcattggagctttgatctctgtggctcgtgatacaggcatggacgactacatcgagactggcattccgcttaatgcgaaaatctcatcgcaattattgattaatatcttcatccccaatacccctcttcacgatggcgccgtgatcattaaaggtaacgagatcgcgagcgctgccagttatctgccattgtccgactcgccgtttctttctaaggagctgggaactcgccatcgtgccgcattagggatttccgaggtgacagattcaatcacaatcgttgtcagcgaggaaacaggtgggatttcccttacgaagggaggcgaactgttccgtgatgtatccgaagaagaattgcataagattttgcttaaagagctggtgactgtcacagctaaaaaaccaagcattttctccaaatggaaaggaggtaagtccgagtgatgagcatgctaatcagccgtggaattcggtctcaggaggaacgattggtaaacccggtgaacgcatgagaaagcccccggaagatcaccttccgggggcttttttattgcgcggaccaaaacgaaaaaagacgctcgaaagcgtctcttttctggaatttggtaccgaggcgtaatgctctgccagtgttacaaccaattaaccaattctgattagaaaaactcatcgagcatcaaatgaaactgcaatttattcatatcaggattatcaataccatatttttgaaaaagccgtttctgtaatgaaggagaaaactcaccgaggcagttccataggatggcaagatcctggtatcggtctgcgattccgactcgtccaacatcaatacaacctattaatttcccctcgtcaaaaataaggttatcaagtgagaaatcaccatgagtgacgactgaatccggtgagaatggcaaaagcttatgcatttctttccagacttgttcaacaggccagccattacgctcgtcatcaaaatcactcgcatcaaccaaaccgttattcattcgtgattgcgcctgagcgagacgaaatacgcgatcgctgttaaaaggacaattacaaacaggaatcgaatgcaaccggcgcaggaacactgccagcgcatcaacaatattttcacctgaatcaggatattcttctaatacctggaatgctgttttcccggggatcgcagtggtgagtaaccatgcatcatcaggagtacggataaaatgcttgatggtcggaagaggcataaattccgtcagccagtttagtctgaccatctcatctgtaacatcattggcaacgctacctttgccatgtttcagaaacaactctggcgcatcgggcttcccatacaatcgatagattgtcgcacctgattgcccgacattatcgcgagcccatttatacccatataaatcagcatccatgttggaatttaatcgcggcctcgagcaagacgtttcccgttgaatatggctcataacaccccttgtattactgtttatgtaagcagacagttttattgttcatgatgatatatttttatcttgtgcaatgtaacatcagagattttgagacacaacgtggctttgttgaataaatcgaacttttgctgagttgaaggatcagatcacgcatcttcccgacaacgcagaccgttccgtggcaaagcaaaagttcaaaatcaccaactggtccacctacaacaaagctctcatcaaccgtggctccctcactttctggctggatgatggggcgattcaggcctggtatgagtcagcaacaccttcttcacgaggcagacctcagcgc

SEQ ID NO: 1267 - DNA, 141 bp, Artificial Sequence
  source: /note="Description of Artificial Sequence: Synthetic polynucleotide"
cttgcgaaacgatcctcatcctgtctcttgatcagatcttgatcccctgcgccatcagatccttggcggcaagaaagccatccagtttactttgcagggcttcccaaccttaccagagggcgccccagctggcaattccgg

SEQ ID NO: 1268 - DNA, 621 bp, Artificial Sequence
  source: /note="Description of Artificial Sequence: Synthetic polynucleotide"
ctaacgtttgaattttgcgtaacgttcgcgagcaatctctaaagtgctattacgtacacgctcaaaacgttccttatccttctgccataacgaacgcaccgcaagaccacgcacgctgttaaaaatcaaccacaaaatgtcctcggcatcgtcacgggataatccacgcgacaccagaacgcccaaccacatatcctcgaccacaaaacggttgcgctctaccgtgcgttggataccctcacgcagagctggatcacgatcagcggccacaatcagatcaaggctaattgaaaagtcgtcatccaagaaaaactcagcggcatcatcaagcatttgctgaatcacatcatcttccggttttaacttagccaggcgagcacggctgcgctcggtgatctgctcatacagccactcaaacgtagcaagcaacagttctaatttggtgggaaaatggtgtgactgggcgccacgagacacccccgcggcgcccggtacatccgcaatacgaaaacccgcgtatcccttctcgcgtaatacaccaagcgccgccgcgatcagtttaccttgtgtttccatcgcacgttcggcttgagtacggcgcttgggcgacatgattaccat

SEQ ID NO: 1269 - protein, 206 aa, Artificial Sequence
  source: /note="Description of Artificial Sequence: Synthetic polypeptide"
MVIMSPKRRTQAERAMETQGKLIAAALGVLREKGYAGFRIADVPGAAGVSRGAQSHHFPTKLELLLATFEWLYEQITERSRARLAKLKPEDDVIQQMLDDAAEFFLDDDFSISLDLIVAADRDPALREGIQRTVERNRFVVEDMWLGVLVSRGLSRDDAEDILWLIFNSVRGLAVRSLWQKDKERFERVRNSTLEIARERYAKFKR

SEQ ID NO: 1270 - DNA, 123 bp, Escherichia coli
taacaccgtgcgtgttgactattttacctctggcggtgataatggttgcaacaaacagacaatctggtctgtttgtattatgttaaccagcacactggcggccgcttactagaaataattttg

SEQ ID NO: 1271 - DNA, 161 bp, Artificial Sequence
  source: /note="Description of Artificial Sequence: Synthetic polynucleotide"
taacaccgtgcgtgttgactattttacctctggcggtgataatggttgcaacaaacagacaatctggtctgtttgtattatgttaaccagcacactggcggccgcttactagaaataattttggccgcatcccacgctaactaatataaaggaggttttaa

SEQ ID NO: 1272 - DNA, 983 bp, Artificial Sequence
  source: /note="Description of Artificial Sequence: Synthetic polynucleotide"
taacaccgtgcgtgttgactattttacctctggcggtgataatggttgcaacaaacagacaatctggtctgtttgtattatgttaaccagcacactggcggccgcttactagaaataattttggccgcatcccacgctaactaatataaaggaggttttaaatggacttttccaacatgagtatccttcactatttagcgaatattgtagacattttggtggtttggttcgtaatttacaaggttatcatgcttattcgcggcacgaaagccgtccagctgttgaaggggattttcattattattgccgtcaagttacttagcggcttcttcggattgcagacagtggaatggattactgatcaaatgctgacttggggtttcttagccattatcattatctttcaaccggaattgcgtcgtgccctggagactttggggcgtggcaatatctttacccgctatggatcacgcattgagcgtgaacaacaccaccttattgagtctattgaaaagtccacgcaatacatggcgaagcgtcgcattggagctttgatctctgtggctcgtgatacaggcatggacgactacatcgagactggcattccgcttaatgcgaaaatctcatcgcaattattgattaatatcttcatccccaatacccctcttcacgatggcgccgtgatcattaaaggtaacgagatcgcgagcgctgccagttatctgccattgtccgactcgccgtttctttctaaggagctgggaactcgccatcgtgccgcattagggatttccgaggtgacagattcaatcacaatcgttgtcagcgaggaaacaggtgggatttcccttacgaagggaggcgaactgttccgtgatgtatccgaagaagaattgcataagattttgcttaaagagctggtgactgtcacagctaaaaaaccaagcattttctccaaatggaaaggaggtaagtccgagtga

SEQ ID NO: 1273 - DNA, 79 bp, Artificial Sequence
  source: /note="Description of Artificial Sequence: Synthetic oligonucleotide"
tgtatttatcaatattgtttgctccgttatcgttattaacaagtcatcaataaagccatcacgagtaccatagaggatc

SEQ ID NO: 1274 - DNA, 117 bp, Artificial Sequence
  source: /note="Description of Artificial Sequence: Synthetic polynucleotide"
tgtatttatcaatattgtttgctccgttatcgttattaacaagtcatcaataaagccatcacgagtaccatagaggatcgccgcatcccacgctaactaatataaaggaggttttaa

SEQ ID NO: 1275 - DNA, 939 bp, Artificial Sequence
  source: /note="Description of Artificial Sequence: Synthetic polynucleotide"
tgtatttatcaatattgtttgctccgttatcgttattaacaagtcatcaataaagccatcacgagtaccatagaggatcgccgcatcccacgctaactaatataaaggaggttttaaatggacttttccaacatgagtatccttcactatttagcgaatattgtagacattttggtggtttggttcgtaatttacaaggttatcatgcttattcgcggcacgaaagccgtccagctgttgaaggggattttcattattattgccgtcaagttacttagcggcttcttcggattgcagacagtggaatggattactgatcaaatgctgacttggggtttcttagccattatcattatctttcaaccggaattgcgtcgtgccctggagactttggggcgtggcaatatctttacccgctatggatcacgcattgagcgtgaacaacaccaccttattgagtctattgaaaagtccacgcaatacatggcgaagcgtcgcattggagctttgatctctgtggctcgtgatacaggcatggacgactacatcgagactggcattccgcttaatgcgaaaatctcatcgcaattattgattaatatcttcatccccaatacccctcttcacgatggcgccgtgatcattaaaggtaacgagatcgcgagcgctgccagttatctgccattgtccgactcgccgtttctttctaaggagctgggaactcgccatcgtgccgcattagggatttccgaggtgacagattcaatcacaatcgttgtcagcgaggaaacaggtgggatttcccttacgaagggaggcgaactgttccgtgatgtatccgaagaagaattgcataagattttgcttaaagagctggtgactgtcacagctaaaaaaccaagcattttctccaaatggaaaggaggtaagtccgagtga

SEQ ID NO: 1276 - DNA, 1918 bp, Artificial Sequence
  source: /note="Description of Artificial Sequence: Synthetic polynucleotide"
tcaatctgtaaacaaatcgaacatcagttgacgaagccagatattggccaaatccttatggtatttagcgtgccagaacatattaatggcaatctcgggaagcactaccggatgaggcagagcggacaagccgaaaggttcgacacagcaatccgctaagcggatcggcactgttgccagcaggtcagtacgttgaagaatatggccaacggctgcgaaatggggcacttccagacgaatatcacgacggatgcctacacgggtcatatacgtgtccacttcaccgtggcctgtgcctgctgcaataacacgtacatgtccataactacaaaagcgttcaagcgtcaatggctcacgggtaacggggtggtccttgcggcacaaacaaacgtagtggttttgcagtaaacggcgttggaagaagcctgtttgaaggttgggcagaagccccaccgccaaatcgacagttccattttgcaacgcctgcattaatgacatagacgaatcgcggacagtagaaatgacgcagttcggtgcttgatgggcaagtacgtccatcaggcgaggcatgaaataaatctccccaatatccgtcattgccagggtgaaagtacgctccgaagtaagggggtcaaagctctcatgatgttgtaaagcgttacgaagggcgtgcatggcactggtgacaggctcggccaagtgtgcggcgtatggcgttggttccatcccttggtgagtacggacgaacaacggatcttgtaacgatgtacgaaggcgttttaatgcgttagaaactgcgggttgagtaagcccaagattttctgcggtgatggagacgcgacgatctaccagcagctgattaaagacaactaacaggttaaggtccagatcacgcaattccatggggcctcgcttgggttattgctggtgcccggccgggcgcaatattcatgttgatgatttattatatatcgagtggtgtatttatcaatattgtttgctccgttatcgttattaacaagtcatcaataaagccatcacgagtaccatagaggatcgccgcatcccacgctaactaatataaaggaggttttaaatggacttttccaacatgagtatccttcactatttagcgaatattgtagacattttggtggtttggttcgtaatttacaaggttatcatgcttattcgcggcacgaaagccgtccagctgttgaaggggattttcattattattgccgtcaagttacttagcggcttcttcggattgcagacagtggaatggattactgatcaaatgctgacttggggtttcttagccattatcattatctttcaaccggaattgcgtcgtgccctggagactttggggcgtggcaatatctttacccgctatggatcacgcattgagcgtgaacaacaccaccttattgagtctattgaaaagtccacgcaatacatggcgaagcgtcgcattggagctttgatctctgtggctcgtgatacaggcatggacgactacatcgagactggcattccgcttaatgcgaaaatctcatcgcaattattgattaatatcttcatccccaatacccctcttcacgatggcgccgtgatcattaaaggtaacgagatcgcgagcgctgccagttatctgccattgtccgactcgccgtttctttctaaggagctgggaactcgccatcgtgccgcattagggatttccgaggtgacagattcaatcacaatcgttgtcagcgaggaaacaggtgggatttcccttacgaagggaggcgaactgttccgtgatgtatccgaagaagaattgcataagattttgcttaaagagctggtgactgtcacagctaaaaaaccaagcattttctccaaatggaaaggaggtaagtccgagtga

SEQ ID NO: 1277 - DNA, 4203 bp, Artificial Sequence
  source: /note="Description of Artificial Sequence: Synthetic polynucleotide"
tagcggagtgtatactggcttactatgttggcactgatgagggtgtcagtgaagtgcttcatgtggcaggagaaaaaaggctgcaccggtgcgtcagcagaatatgtgatacaggatatattccgcttcctcgctcactgactcgctacgctcggtcgttcgactgcggcgagcggaaatggcttacgaacggggcggagatttcctggaagatgccaggaagatacttaacagggaagtgagagggccgcggcaaagccgtttttccataggctccgcccccctgacaagcatcacgaaatctgacgctcaaatcagtggtggcgaaacccgacaggactataaagataccaggcgtttcccctggcggctccctcgtgcgctctcctgttcctgcctttcggtttaccggtgtcattccgctgttatggccgcgtttgtctcattccacgcctgacactcagttccgggtaggcagttcgctccaagctggactgtatgcacgaaccccccgttcagtccgaccgctgcgccttatccggtaactatcgtcttgagtccaacccggaaagacatgcaaaagcaccactggcagcagccactggtaattgatttagaggagttagtcttgaagtcatgcgccggttaaggctaaactgaaaggacaagttttggtgactgcgctcctccaagccagttacctcggttcaaagagttggtagctcagagaaccttcgaaaaaccgccctgcaaggcggttttttcgttttcagagcaagagattacgcgcagaccaaaacgatctcaagaagatcatcttattaaggggtctgacgctcagtggaacggtgcaccctgcagggctagctgataaagcgttcgcgctgcattcggcagttcaatctgtaaacaaatcgaacatcagttgacgaagccagatattggccaaatccttatggtatttagcgtgccagaacatattaatggcaatctcgggaagcactaccggatgaggcagagcggacaagccgaaaggttcgacacagcaatccgctaagcggatcggcactgttgccagcaggtcagtacgttgaagaatatggccaacggctgcgaaatggggcacttccagacgaatatcacgacggatgcctacacgggtcatatacgtgtccacttcaccgtggcctgtgcctgctgcaataacacgtacatgtccataactacaaaagcgttcaagcgtcaatggctcacgggtaacggggtggtccttgcggcacaaacaaacgtagtggttttgcagtaaacggcgttggaagaagcctgtttgaaggttgggcagaagccccaccgccaaatcgacagttccattttgcaacgcctgcattaatgacatagacgaatcgcggacagtagaaatgacgcagttcggtgcttgatgggcaagtacgtccatcaggcgaggcatgaaataaatctccccaatatccgtcattgccagggtgaaagtacgctccgaagtaagggggtcaaagctctcatgatgttgtaaagcgttacgaagggcgtgcatggcactggtgacaggctcggccaagtgtgcggcgtatggcgttggttccatcccttggtgagtacggacgaacaacggatcttgtaacgatgtacgaaggcgttttaatgcgttagaaactgcgggttgagtaagcccaagattttctgcggtgatggagacgcgacgatctaccagcagctgattaaagacaactaacaggttaaggtccagatcacgcaattccatggggcctcgcttgggttattgctggtgcccggccgggcgcaatattcatgttgatgatttattatatatcgagtggtgtatttatcaatattgtttgctccgttatcgttattaacaagtcatcaataaagccatcacgagtaccatagaggatcgccgcatcccacgctaactaatataaaggaggttttaaatggacttttccaacatgagtatccttcactatttagcgaatattgtagacattttggtggtttggttcgtaatttacaaggttatcatgcttattcgcggcacgaaagccgtccagctgttgaaggggattttcattattattgccgtcaagttacttagcggcttcttcggattgcagacagtggaatggattactgatcaaatgctgacttggggtttcttagccattatcattatctttcaaccggaattgcgtcgtgccctggagactttggggcgtggcaatatctttacccgctatggatcacgcattgagcgtgaacaacaccaccttattgagtctattgaaaagtccacgcaatacatggcgaagcgtcgcattggagctttgatctctgtggctcgtgatacaggcatggacgactacatcgagactggcattccgcttaatgcgaaaatctcatcgcaattattgattaatatcttcatccccaatacccctcttcacgatggcgccgtgatcattaaaggtaacgagatcgcgagcgctgccagttatctgccattgtccgactcgccgtttctttctaaggagctgggaactcgccatcgtgccgcattagggatttccgaggtgacagattcaatcacaatcgttgtcagcgaggaaacaggtgggatttcccttacgaagggaggcgaactgttccgtgatgtatccgaagaagaattgcataagattttgcttaaagagctggtgactgtcacagctaaaaaaccaagcattttctccaaatggaaaggaggtaagtccgagtgaggaggaacgattggtaaacccggtgtaataagcatgctaatcagccgtggaattcggtctcaggaggaacgattggtaaacccggtgaacgcatgagaaagcccccggaagatcaccttccgggggcttttttattgcgcggaccaaaacgaaaaaagacgctcgaaagcgtctcttttctggaatttggtaccgaggcgtaatgctctgccagtgttacaaccaattaaccaattctgattagaaaaactcatcgagcatcaaatgaaactgcaatttattcatatcaggattatcaataccatatttttgaaaaagccgtttctgtaatgaaggagaaaactcaccgaggcagttccataggatggcaagatcctggtatcggtctgcgattccgactcgtccaacatcaatacaacctattaatttcccctcgtcaaaaataaggttatcaagtgagaaatcaccatgagtgacgactgaatccggtgagaatggcaaaagcttatgcatttctttccagacttgttcaacaggccagccattacgctcgtcatcaaaatcactcgcatcaaccaaaccgttattcattcgtgattgcgcctgagcgagacgaaatacgcgatcgctgttaaaaggacaattacaaacaggaatcgaatgcaaccggcgcaggaacactgccagcgcatcaacaatattttcacctgaatcaggatattcttctaatacctggaatgctgttttcccggggatcgcagtggtgagtaaccatgcatcatcaggagtacggataaaatgcttgatggtcggaagaggcataaattccgtcagccagtttagtctgaccatctcatctgtaacatcattggcaacgctacctttgccatgtttcagaaacaactctggcgcatcgggcttcccatacaatcgatagattgtcgcacctgattgcccgacattatcgcgagcccatttatacccatataaatcagcatccatgttggaatttaatcgcggcctcgagcaagacgtttcccgttgaatatggctcataacaccccttgtattactgtttatgtaagcagacagttttattgttcatgatgatatatttttatcttgtgcaatgtaacatcagagattttgagacacaacgtggctttgttgaataaatcgaacttttgctgagttgaaggatcagatcacgcatcttcccgacaacgcagaccgttccgtggcaaagcaaaagttcaaaatcaccaactggtccacctacaacaaagctctcatcaaccgtggctccctcactttctggctggatgatggggcgattcaggcctggtatgagtcagcaacaccttcttcacgaggcagacctcagcgc

SEQ ID NO: 1278 - DNA, 903 bp, Pseudomonas sp.
tcaatctgtaaacaaatcgaacatcagttgacgaagccagatattggccaaatccttatggtatttagcgtgccagaacatattaatggcaatctcgggaagcactaccggatgaggcagagcggacaagccgaaaggttcgacacagcaatccgctaagcggatcggcactgttgccagcaggtcagtacgttgaagaatatggccaacggctgcgaaatggggcacttccagacgaatatcacgacggatgcctacacgggtcatatacgtgtccacttcaccgtggcctgtgcctgctgcaataacacgtacatgtccataactacaaaagcgttcaagcgtcaatggctcacgggtaacggggtggtccttgcggcacaaacaaacgtagtggttttgcagtaaacggcgttggaagaagcctgtttgaaggttgggcagaagccccaccgccaaatcgacagttccattttgcaacgcctgcattaatgacatagacgaatcgcggacagtagaaatgacgcagttcggtgcttgatgggcaagtacgtccatcaggcgaggcatgaaataaatctccccaatatccgtcattgccagggtgaaagtacgctccgaagtaagggggtcaaagctctcatgatgttgtaaagcgttacgaagggcgtgcatggcactggtgacaggctcggccaagtgtgcggcgtatggcgttggttccatcccttggtgagtacggacgaacaacggatcttgtaacgatgtacgaaggcgttttaatgcgttagaaactgcgggttgagtaagcccaagattttctgcggtgatggagacgcgacgatctaccagcagctgattaaagacaactaacaggttaaggtccagatcacgcaattccat

SEQ ID NO: 1279 - DNA, 155 bp, Artificial Sequence
  source: /note="Description of Artificial Sequence: Synthetic polynucleotide"
ggggcctcgcttgggttattgctggtgcccggccgggcgcaatattcatgttgatgatttattatatatcgagtggtgtatttatcaatattgtttgctccgttatcgttattaacaagtcatcaataaagccatcacgagtaccatagaggatc

SEQ ID NO: 1280 - protein, 300 aa, Pseudomonas sp.
MELRDLDLNLLVVFNQLLVDRRVSITAENLGLTQPAVSNALKRLRTSLQDPLFVRTHQGMEPTPYAAHLAEPVTSAMHALRNALQHHESFDPLTSERTFTLAMTDIGEIYFMPRLMDVLAHQAPNCVISTVRDSSMSLMQALQNGTVDLAVGLLPNLQTGFFQRRLLQNHYVCLCRKDHPVTREPLTLERFCSYGHVRVIAAGTGHGEVDTYMTRVGIRRDIRLEVPHFAAVGHILQRTDLLATVPIRLADCCVEPFGLSALPHPVVLPEIAINMFWHAKYHKDLANIWLRQLMFDLFTD

SEQ ID NO: 1281 - DNA, 164 bp, Artificial Sequence
  source: /note="Description of Artificial Sequence: Synthetic polynucleotide"
agttgttcttattggtggtgttgctttatggttgcatcgtagtaaatggttgtaacaaaagcaatttttccggctgtctgtatacaaaaacgccgcaaagtttgagcgaagtcaataaactctctacccattcagggcaatatctctcttggatccaaagtgaa

SEQ ID NO: 1282 - DNA, 201 bp, Artificial Sequence
  source: /note="Description of Artificial Sequence: Synthetic polynucleotide"
agttgttcttattggtggtgttgctttatggttgcatcgtagtaaatggttgtaacaaaagcaatttttccggctgtctgtatacaaaaacgccgcaaagtttgagcgaagtcaataaactctctacccattcagggcaatatctctcttggatccaaagtgaacccgcatcccacgctaactaatataaggggggcaaga

SEQ ID NO: 1283 - DNA, 1251 bp, Artificial Sequence
  source: /note="Description of Artificial Sequence: Synthetic polynucleotide"
atgacgacccgaaatgattgcctagcgttggatgcacaggacagtctggctccgctgcgccaacaatttgcgctgccggagggtgtgatatacctggatggcaattcgctgggcgcacgtccggtagctgcgctggctcgcgcgcaggctgtgatcgcagaagaatggggcaacgggttgatccgttcatggaactctgcgggctggcgtgatctgtctgaacgcctgggtaatcgcctggctaccctgattggtgcgcgcgatggggaagtagttgttactgataccacctcgattaatctgtttaaagtgctgtcagcggcgctgcgcgtgcaagctacccgtagcccggagcgccgtgttatcgtgactgagacctcgaatttcccgaccgacctgtatattgcggaagggttggcggatatgctgcaacaaggttacactctgcgtttggtggattcaccggaagagctgccacaggctatagatcaggacaccgcggtggtgatgctgacgcacgtaaattataaaaccggttatatgcacgacatgcaggctctgaccgcgttgagccacgagtgtggggctctggcgatttgggatctggcgcactctgctggcgctgtgccggtggacctgcaccaagcgggcgcggactatgcgattggctgcacgtacaaatacctgaatggcggcccgggttcgcaagcgtttgtttgggtttcgccgcaactgtgcgacctggtaccgcagccgctgtctggttggttcggccatagtcgccaattcgcgatggagccgcgctacgaaccttctaacggcattgctcgctatctgtgcggcactcagcctattactagcttggctatggtggagtgcggcctggatgtgtttgcgcagacggatatggcttcgctgcgccgtaaaagtctggcgctgactgatctgttcatcgagctggttgaacaacgctgcgctgcacacgaactgaccctggttactccacgtgaacacgcgaaacgcggctctcacgtgtcttttgaacaccccgagggttacgctgttattcaagctctgattgatcgtggcgtgatcggcgattaccgtgagccacgtattatgcgtttcggtttcactcctctgtatactacttttacggaagtttgggatgcagtacaaatcctgggcgaaatcctggatcgtaagacttgggcgcaggctcagtttcaggtgcgccactctgttacttaa

SEQ ID NO: 1284 - DNA, 1023 bp, Artificial Sequence
  source: /note="Description of Artificial Sequence: Synthetic polynucleotide"
agttgttcttattggtggtgttgctttatggttgcatcgtagtaaatggttgtaacaaaagcaatttttccggctgtctgtatacaaaaacgccgcaaagtttgagcgaagtcaataaactctctacccattcagggcaatatctctcttggatccaaagtgaacccgcatcccacgctaactaatataaggggggcaagaatggacttttccaacatgagtatccttcactatttagcgaatattgtagacattttggtggtttggttcgtaatttacaaggttatcatgcttatccgcggcacgaaagccgtccagctgttgaaggggattttcattattattgccgtcaagttacttagcggcttcttcggattgcagacagtggaatggattactgatcaaatgctgacttggggtttcttagccattatcattatctttcaaccggaattgcgtcgtgccctggagactttggggcgtggcaatatctttacccgctatggatcacgcattgagcgtgaacaacaccaccttattgagtctattgaaaagtccacgcaatacatggcgaagcgtcgcattggagctttgatctctgtggctcgtgatacaggcatggacgactacatcgagactggcattccgcttaatgcgaaaatctcatcgcaattattgattaatatcttcatccccaatacccctcttcacgatggcgcagtgatcattaaaggtaacgagatcgcgagcgctgccagttatctgccattgtccgactcgccgtttctttctaaggagctgggaactcgccatcgtgccgcattagggatttccgaggtgacagattcaatcacaatcgttgtcagcgaggaaacaggtgggatttcccttacgaagggaggcgaactgttccgtgatgtatccgaagaagaattgcataagattttgcttaaagagctggtgactgtcacagctaaaaaaccaagcattttctccaaatggaaaggaggtaagtccgagtga

SEQ ID NO: 1285 - DNA, 59056 bp, Escherichia coli
aggcctctcctcgcgagaggcattttttatttgatgggataaagatctttgcgcttatacggttggatttcgcccggtttgcgagttttcagcaattttaatatccaggtgtattgttctggtcgcggaccaacaaaaatctcgacttcttcattcatccgccgcgcaatcgtatgatcatccgcctctaacagatcatccatcggtgggcgcacctgaatcgtcagacgatgcgtcttgccatcataaatcggaaatagcggtacaacgcgcgcacggcacactttcatcaaacgaccaatcgcgggcaacgtcgctttataggtggcaaagaaatcaacaaattcgctgtgttctgggccatgatcctgatcgggtaaataatatccccagtaaccctgacgtaccgactggatgaatggtttaataccatcatttctcgcatgcagacgaccaccaaagcgacggcgcaccgtgttccagacataatcaaaaaccgggttgccctgattatggaacatcgctgccattttctgcccttgcgaggccatcagcatggcaggaatatcgacggcccaaccgtgcggcaccagaaaaatcactttctcgttattacgtcgtatctcttcgatgatctccagcccttgccagtcaacgcgcggctgaattttctccggcccgcgtattgccaactcagccatcattaccatcgcttgcggcgcggtggcaaacatctcatctacaatcgcttcgcgttcagcttcactacgttctggaaagcagagcgacagattgattaacgcacgacggcgtgagctttttcccagtcgtccggcaaaacgtcccagccgtgccagaatgggatcacggaactttggcggcgttaaagcgatacccgccatcgctgctacgcccagccatgctccccagtagcgcgggtggcgaaaggatttatcaaactcaggaatgtattcgctattattttttttcgtttccatgcttttccagtttcggataaggcaaaaatcaatctggtgatagtgtagcggcgcaacttgccccgcaccaaataaaaaagccggtactgactgcgtaccggctgcgaatggatgttaattaatcaaaccgtagctgcggcacaatctctttggcctgtgccaggaattcgcgacgatcggagccggtcagcccttcggtacgcggcagttttgccgtcagcgggtttacggcctgctggtttatccatacttcatagtgcagatgcggcccggttgaacgtccggtattaccggaaagcgcgatacggtcgccacgtttcaccttctgtcccggtttcaccaggatcttgcgcaagtgcatataacgcgtggtgtagctgcgaccatgacgaatagccacataataacctgctgcgccactacgtttggcaaccaccacttcaccgtcacccactgaaagcactggcgtaccttgtggcatggcaaaatcaacacctctgtgtggcgcaacgcgaccggtcaccggattagtacgacgcgggttaaagttagatgagatacggaactgtttcgccgtcgggaatcgcaagaatcctttcgccagaccagtaccgttacgatcgtagaatttgccatcttcagcgcggattgcgtaataatctttaccttctgaacgcaaacgtacgcccagcagctggctttgctcacgtttaccatcaagcatttctcgtgacattaacaccgcaaattcatcgccttttttcagtttgcggaaatccatttgccactgcatggctttaatcactgcgctcacttcggcgctggttaaaccggcgtttctggcgctggcaacaaagcttcccccgacggtacctttcagcagattgttgacccactctccttgctgcatttcgctggtcattttaaaaccgttagcggcagtacggtcataggttcgggtttcacgacgagacacttcccaggtgaggcgctgcagttcgccgtccgcggttaatgtccaggagagttgttgaccgattttcaggttacgcaattctttgtcggcagcagccagttgggtgatatcacccatatcaataccatactgattgagaatgctgcttagcgtatcgccagtggaaacaacatattcatgcacgcccgcttcaccggcgattttgtcatccagttcgtcctggggaatggcttcatcttcttgtgcagcttgatcaatcggctcactggcttcaggtaagagcgaacgaatttcgttctgttccagctcaatggttttgacaattggcgtggcatcgcggtgataaacatagggccgccagacagcgacggccagagtaagaacggtgagcgaccccaacataacgcggtgtggtcgcggtaaattattaaacgccagggcgacagagcgggctatctgttgcacgtaatcacttcctcattaatctcctttcaggcagctcgcatactggttggctaattgattcaggaattctgaatagcttgttttacccagtttgatattcgtccccaggggatccaacgttcccatacgaacggatgtccctcgtgcgacgctctcaacgaccgctggcctgaactgtggctcagcaaaaacgcaggttgctttttgctcaaccaactgtgttcttatttcatgtaaacgctgcgcgccaggttgaatctcagggttaacggtaaaatgaccaagcggtgtcagtccgaactgtttttcgaaatagccgtaagcatcgtgaaaaacgaaataacctttccccttgagcggcgcgagctcgttaccaacctgcttttcggttgaggctaattgtgcctcaaaatccttcaggttggcgtcaagtttggctcgactttgcggcataagttccactaattttccatggattgcaaccgctgtagcccgcgctatctctggggaaagccaaagatgcatgttgaaatcgccgtgatggtgatcttcgtcacttttttccgcgtggtcgtgatcatcatcatcgccgtgaatacttttcatcagcagcggtttcacattctctagctgcgcaatcgttacctgtttcgcttcaggtaatttacttaccggtttttgcatgaacgcttccatctccgggccaacccaaacgactaagtccgcgttctgtaagcgttttacatctgatggacgcagtgaataatcatgttctgaagccccgtcaggtagtaaaacctccgtttctgttaccccatcagcaatggcagaagcgatgaacccaacgggtttaagcgaagcgacaacggcagcatctgcggcctgtgttgcaccgccccagagagcggcggataatgctgcgaaaagaagcgtttttttatgtaacataatgcgaccaatcatcgtaatgaatatgagaagtgtgatattataacatttcatgactactgcaagactaaaattaacatgacaagtctggtttccctggaaaatgtctcggtttcttttggccaacgccgcgtcctctctgatgtgtcgctggaacttaaacctggaaaaattttgactttacttgggccaaacggcgcaggtaagtcgacactggtacgggtagtgctcgggctggtaacacccgatgaaggggttatcaagcgcaacggaaaactgcgcatcggctatgtaccgcagaagctgtatctcgacaccacgttgccactgaccgtaaaccgttttttacgcttacgccctggcacacataaagaagatattttgcctgcactgaaacgtgtccaggccgggcatctgattaacgcaccgatgcaaaagctctcgggtggcgaaacgcagcgtgtactgttagcgcgagcattgttaaatcgaccgcaattattagtgctggatgaacccactcagggcgtggatgtgaatggtcaggtggcgttatatgaccttattgaccaactgcgtcgcgaactggattgtggcgttttaatggtatctcacgatctgcatctggtaatggcaaaaaccgatgaagtgctttgcctgaatcaccacatttgttgttccggcacaccggaagttgtttccctgcatccggagtttatttctatgtttggtcctcgtggtgctgaacaactgggtatctatcgccatcatcataatcatcgtcacgatttacagggacgaattgttttgcgtcggggaaatgatcgctcatgattgaattattatttcccggttggttagccgggatcatgctcgcctgtgccgcgggtccgctgggttcgtttgtagtctggcgtcgtatgtcttatttcggtgatacgctggctcatgcctcattacttggcgtcgcgtttggtttgttgctggacgtgaatccattctatgcggtgattgccgttacgctgctgctggcgggcggtctggtatggctggagaagcgtccacagctggcgatcgacacgttattagggattatggcgcacagtgccctgtcgctgggcctggtggtcgttagtctgatgtctaatattcgtgttgatttgatggcttacctgttcggtgatttactggcagtgacgccagaagatctcatctctattgcgattggcgtggtcatcgtggtggctattttgttctggcaatggcgcaatttgctgtcgatgacgattagcccggatctggcgtttgttgatggtgtgaaattacagcgcgtgaaattgttgttgatgctggtgacggcattgacgattggtgtagcgatgaaattcgtcggcgcgttgattattacttcactgctgattattcctgctgctactgcacgtcgctttgcccgcacgccggaacagatggctggtgtcgctgttttggtggggatggtggcagtgactggcggtttaaccttttccgcattttacgatacacctgcaggcccgtcggtggtgctatgcgcggcactgttatttattatcagtatgatgaaaaagcaggccagctaatctgtcgctgaacacatttgtcggatgcggcgcgagcgccttatcccacctgcggttcgctatctctggtaggcctgataagacgcgaacagcgtcgcatcaggcacactgccagtgtcggatgcggctcgagcgaccaatccgacttacggcatttctggcggcgtgatgccgaagtggttccacgcccgcactgtcgccatacgcccgcgcggtgtacgctgcaaaaagccttgctgaatcaaataaggttccagtacatcctcaatggtttcacgttcttcgccaatggctgccgccaggttatccagacctaccggcccaccaaagaacttatcgattaccgccagcaacaatttgcggtccatataatcgaaaccttcagcatcgacattcaacatatccagcgcctgagcagcgatatctgccgagatggtgccatcgtgcttcacttcagcgaaatcacgcactcgacgcagcagacggttggcaatacgtggcgtaccgcgcgcacgacgagcaacttccagcgcgccgtcatcactcatctcaagccccataaagcgtgcgctgcgactgacgatatattgcagatccggcacctgataaaactccagacgttgcacaataccaaaacgatcgcgcaacggtgatgtcagcgaacctgcgcgcgtggttgcaccaatcagggtaaacggcggcaaatcaattttaatggagcgtgccgccggaccttcaccaatcatgatatccagttggtaatcttccattgccggatacaacacctcttccaccactggtgaaagacggtggatctcatcaataaacagtacatcgtgtggttcaaggttagtgagcattgctgccagatcgcccgccttttccagcaccggaccagaagtcgtgcgtaaattaacgcccatttcattggcgacaatattggcaagcgtagttttacccaaccccggaggaccaaaaatcaatagatgatcgagggcatcgccgcgcagtttcgctgctttgatgaaaatctccatctgcgaacgaacctgcggctgaccaacatactcttccagtaatttagggcgaatggcgcgatctgccacatcttccggcaaagtggtaccggcagaaatcagacggtctgcttcaatcatcctttacctcataacgcggcgcgtagggcttcgcgaattaatgtttcactgctggcgtcagggcgagcgattttgctcaccatgcggcttgcttcttgtggtttatagcccagtgccaccagcgcagcaaccgcttcctgttcagcatcgtcggtcgccgggctggcaggagacgtgagtaccaggtcggcggctggcgtaaagagatcgccatgcaaacctttaaatcggtctttcatttcgacaatcaagcgttcggcggtttttttgccaatacccggcagtttcaccagtgcccccacttcttcacgctcaacggcattaacgaactgctgcgctgacattccggagaggatcgccagcgccaacttcgggccgacgccgttggttttgatcaactctttgaacaacgtgcgctcttgtttattgttaaaaccgtacagcagttgcgcgtcttcacgcaccacaaagtgggtgaaaacgatcgcttcctgacccgcttcagggagttcataaaaacaggtcatcggcatatgcacttcatagcctacgccgcccacttcaattaacaccagcgggggttgtttttcaatgatgatgcctctgagtctgcctatcacatgacgctcctgcgtaatgaatcaaagataatgctgtatgataaaaaaatgctggatagatatccagcgaaggatgaagaaaacttgcgaggtgtctcgatgatctgaaaaatggcgcagtataatttattctacagattatattggaagcaaatatttaaatattacatattcagcgaagaaatgtgtaataaaaatacacattgcgacccctgaaaaaaataaattttttatgctattacgtatattcatatctatttcaatggaatgacaacgtgaatattaattatcctgctgaatatgaaattggtgatatcgtctttacatgtataagtgctgccttatttggtcaaatatcagctgcatcaaattgctggagtaatcacgtcgggatcattatcggtcataacggtgaagactttctggttgcagaaagccgtgttcccctctcaaccatcactacgctatcccgttttattaaacgctctgctaatcaacgctatgctataaagcgattagacgccggactaacagaacaacaaaatcaacgaattgttgaacaggttccttcccggctacgcaaaatttaccacaccggttttaaatacgaatcttcgcgccagttctgttcaaaatttgtttttgatatttataaagaggcgctatgtattccggtgggtgaaatagagacgtttggagaattgttaaatagcaatccaaatgcaaaactcactttctggaaattctggttcttaggttctattccgtgggagcgtaaaaccgtcacgccagccagtttgtggcatcatccgggtttggtgttgattcacgcggtgggagttgaaacgcctcagcctgaactgaccgaggcggtataacttaacgcagtcgccctctcgccaggttcagtcgcgattcgctcatttgcatcgcattctgactaacgtggcagtgggtgatggcaatcgccagcgcatcggcggcatccgcctgtggattagcgggcagtttcagcaaggtgcggaccatatgctgcacctggcttttttcggcactaccaatacctaccactgtttgctttacctgacgtgccgcatattcaaataccggcaattcctgattcaccgccgccacaatcgccacgccgcgcgcctgccccagtttcagggctgagtcagcgttcttcgccataaagacctgttcaatggcgaaataatcaggctggaattgggtgatgatttccgtcacgcccgcatagatgagcttcagacgagacggtaaatcatccactttggtgcgtatgcatccgctacccaggtaggacagttgcctgcctacctggcggatgacgccatagccggtcacgcgcgaacccgggtcaatgccgagaataatagccatcacgcgtctccgttttgctgtttagcaggcctcatcagagagtcgctgcaacctcatcagagatttcaccgttatggtaaacttcctgcacgtcgtcgcaatcttccagcatatcgatcagacgcatcagtttcggtgcggtttctgcatccatatcagctttggtggacgggatcatggaaacttccgcgctgtctgctttcagacctgccgcttccagagcgtcgcgtactttgcccatttcttcccatgcagtgtagacatcaatcgcgccgtcatcataggtcacaacgtcttcagcaccggcttccagggctgcttccatgatggtgtcttcatcgcctttctcgaaggagatcacgccttttttgctgaacaaataagctacggaaccatcagtaccgaggttaccgccacatttgctgaatgcatgacgcacttcagcaacggtacggttgcggttgtcagacagacattcaatcatgattgccgtgccgccaggaccgtaaccttcgtagatgatggtttccatgtttgcatcatcatcaccgcccacacctcgtgcaattgcgcggttcagagtgtcacgggtcatgttgttagacagtgctttatcaattgctgcacgcaaacgcgggttagcgtccggatcaccaccgcccagcttagccgcggttaccagctcacgaatgattttagtgaagattttaccgcgcttagcatcctgcgcagctttacgatgtctggtgttggcccatttactatgacctgccataaaaatatctccagatagccctgcctgttcaggcagcgttaattacaaactgttcaatcgcctgccggttgctccaggacttagtgagcgccgccgcagcagacgcatcaagccacttgtaagccagatgttcagtgaaaacgatctggcgctcgtgcggaagcgcaagacagaaccatgattccgtattacgcgtcacgcccggcgcatagcgatgacgtaaatgtgaaaaaatttcaaactctaccgtgcgctgacagtcaattaaggtcagttgttcagcgacaacatcaatggtgacctcttcctttacttcgcgcatggcagcttgcggcgcggtttcaccctcttccacgctgccggttaccgactgccagaaatcgggatcgtcacgccgctgcaacatcagcacccgtttcgtatcttgtgcgtagatgaccactaagatcgaaacgggacgcttataagccatatcagttattctcagccttcttcacaacctgaatgctcagctcagccagtgcagtcgggttagcaaagctcggcgcttcagtcatcaaacacgctgccgccgtggttttcgggaaggcgataacgtcacggatattgtcggtgccggtcagcagcatcgtcagacggtcaagaccgaatgccaaacctgcgtgcggcggagtaccgtatttcagggcgtcgagcaggaagccgaatttctcgcgctgttcctcttcgttgatacccagaataccaaacaccgtctgctgcatatcaccattatggatacgcacagaaccaccgcccacttcgtaaccattgatgaccatatcgtaagcgttagccaccgcattttccggtgcagctttcagttctgctgccgtcatgtctttcggtgaggtgaacggatggtgcattgctgtcaggccgccttcaccgtcgtcttcaaacatcgggaagtcgataacccacagcggtgcccatttgctttcgtcggtcagaccaaggtctttacccactttcaggcgcagtgcgcccatcgcgtcggcaacaattttcttgttgtcggcaccgaagaaaatcatatcgccatcttgcgcgccagtacgctccaggatggcttcgatgatttctgcattaaggaacttcgctaccgggctattgataccttccagacctttcgcgcgttcgttaactttgatgtaagccagacctttcgcgccgtagattttaacgaagttaccgtattcgtcgatctgcttacgggtcaacgatgcgccgcccggaacacgcagagcggcaacacggcctttcggatcgttcgccggacctgcaaatactgcaaactcaacagatttcagcagatcggcaacgtcggtcagttccatcgggttacgcagatccggtttatcagaaccataacggcgttctgcttctgcaaaggtcattaccgggaaatcgcccagatccacgcccttcacttccagccacagatgacgcaccagcgcttccatcacttcacgcacttgcggcgcggtcatgaaagaagtttccacatcgatctgagtaaattcaggctgacggtcagcacgcaggtcttcgtcacggaagcatttaacgatctgatagtagcggtcaaagccggacatcatcagtagctgtttgaacaactgcggggattgcggcagcgcgtagaatttacctttgtgcacacgagaaggcaccaggtagtcacgcgcgccttcaggcgtggctttggtcagcatcggagtttcgatgtcgaggaagccgtggtcatccataaaacggcgcaccaggctggtgattttagcgcgggttttcaggcgctgagccatttccgggcgacgcaggtcgaggtagcggtatttcagacgcgcttcttcggtgttgacgtggttagagtcaagcggcagaacatctgcacggttgatgatagtcagcgaggacgccagtacttcgatttcgccagtcgccatatcgcggttaatatttttttcgtcacgcgcacgtacggtgcccgtgacctgaatgcagaactcattacgcagttcagaggccagctttaacgcgtccgcacgatccggatcgaaaaatacctgcacgataccttcgcggtcgcgcatatcgatgaagatcaggctaccaagatcacgacgacggttgacccaaccacacagagtcacctgctgccccacgtgggacaaacggagctgtccacaatattctgtacgcatgagatatcccttaacttagctgccggcggatgccccctgctgcgcaggtgaccaagtcgcagcgttagctgtatgtcacaactgaatgaaaaaaggcggctattatactggaaattctgccgcaccgtaagagcctggcccgcgctggaacgcctcgttaccactttatatcgggcctgaaatcagactctacgccagtttgctataaaggtgttgcccgaactcataaaaattaacaaaatttgtcgttccgccatcggctaatcgcattaaggtgagaggcacgattttgttttgtcaggagtcatcatgcttgaacttaatgctaaaaccaccgcgctggtggtgattgatttacaagaaggcatcttgccttttgccggaggtccacatactgccgatgaggtggttaatcgcgccgggaagctggcggcgaaatttcgcgccagcggtcagcccgtgtttctggtgcgcgttggctggtctgccgattacgccgaagcattaaaacagccggttgatgccccctcccccgcaaaagtgttgcccgaaaactggtggcaacatcctgctgcattaggtgcaaccgacagcgatatcgaaatcatcaaacgtcaatggggtgcgttttacggtacggatctggagttgcaattacgccgccggggtatcgatacaatagtgttatgtgggatctcgaccaatatcggtgttgaatccaccgcccgcaatgcctgggaactcggttttaatctggtgattgccgaagatgcctgtagcgccgctagcgccgagcagcacaataacagcattaatcatatctacccgcgcatcgcccgtgtgcgtagcgttgaagagatcctcaacgcgttatgatttacatcggtttgccacaatggtcgcatcctaaatgggtgcggttggggatcaccagccttgaagagtatgcccgccactttaactgcgtgacgcgggcattttaaaaatcactaaagaacgcccaagagcatgtgttttctttagtttattcaatgcattaaaaaatagtttcgcatgaaattcggtaaacttcatgtgtgcaataatgtcccattcatgccccaaaatgccccaaagcagacatttttgccccaagtatgccccacaagtcacgtcttcaagtcgtctatatccatagcacaccgagttacattcttgcatccggggtgtcgacaatacctactttattgagtgtgcgagaattaccaggaacctttccacaatgtagtagtctaatagtcgaatccatctaacattaagaagcgttatgatcactagcctctcattgatatcttctgtaatagtcactctatgtatcatggtgttcgctacagtaaaggtagggattggtttgtctaacaatccagacagaaatgataattaacctcaaccacgtaaccacacttcatacttcatacttcacttaacagtgaagtgctcacatcaccgggcagtcatcaaactccgcattcctggcatcattaatgatgtacgtgatcactccaaatatagcgggtgcagaactgtaaccatcatcatctgctggcagcgcttcccttctcccgttatccagattaaccaggtgcggctgaggatgagtccgatatcgcttgatcctgaattccccgtcgattgcacatatcagcagtgaaccatcgcaggcagtaagtgacgcatccacaacaagcaacgctccctggattatcccttccctgaaatgtgaacgcgatgcccgcatgaaataagtcgctgcgggctgactgattagctgctgatcgagggagattcgtgtttcaacataatctgccgcaggtgaaggaaatcccatgtttacgccctctcttgaataccggataaaaacacagtataaatactgtatatccatccagcaaagaggcaatgagcaatgttcgtggaactcgtttatgacaaaaggaattttgatggtctgcccggtgcaaaagatatcattctgggcgagttaactaagagagttcaccggatcttccccgatgctgatgttcgggttaaaccgatgatgacactgccggcgatcaacactgacgccagcaagcatgagaaggaacagataagccgtactgttcaggaaatgtttgaagaggctgaattctggttagtgagtgagtaaagattttcaatgcccgccacagttacgtattgattatgctgtggaggatattcattttcgtaaacgttggtttgggagaagcggcaaaacggaatgtgggaacaggggaaaatcagataccagatatgtctgcatttccatctggcaataactggtttcagttaccaagtggacatatcgttcagatattttccatgaacgttcttggtgcagatgctaatggcacgtcagctaattaccccattgcttttccaacaacgatgattgctgtcagtgctctatggtctgatgggactgtagcaaatgcaccgacatacaagatgatggggaacacgactaacagaacaactttgacgataaaagtatcagccagctcaggtacttacgggacaatgattattgcggtgggacgataatatgaataaatacagttactctccttcagaaaatgccttttatgctgttgcgttaaaaaatacctatgaattgagtggcacatggccagctgatgcattagatattcctgatgacatttctgtaaaatatatggcggaaccgccacaagggaaaatccgagttgcaggggaaaatggttttcccacatgggctgaaatacctccaccatcacatgaggaacttattgaacaggccgaatcagagaggcaattattgattaaccaggccaacgaatacatgaacagtaaacaatggcccggtaaagccgctattggtcgtctgaaaggcgaggaactggcacaatataattcgtggctggattatctggacgcactggaactggtcgatacttccggtacgcccgatattgaatggcctacgcctccggcagttcaggccagatgacatccggcgcggtgctggtatctgttgcagtcaccgcgtcaatgtaatccagcacggcgttaagtcgggttgtttctgcctgagtcagtttccgtccggcctgtaatttcagctgaatcagactaatggaagccattgctgcatcaatcagtgattggcgctgtgcttctgccgcttctactgaggcaccgtgttgtgcctcagtatctgtcacccatttctcaccatcccatttatcatatggcgttaacggtgaaagcgtgacataaccgtttttgatggcaccgatataatccactgtaacagctgcgccattttcgattgagtaaacagtctcattgcgatggtcttcctcatggctccatcccttacctgtaaatactgccactcttcccggaatgttttcgtccgggtcaataccagtggaacaggcgggcatacttacgccagtattaatatattcatcagaccagcccgtatattcagacgttactgcatcataataaaaacaacgcatatcacccggcactgcagccagcccattttcatcaaaaacaggtttcattatttagccctcaccagaaagttaaatgcaatatttcgcggtctgacagcaacaaaattcacaccatcacccacagagttactgttgaaattaaatcgtgaaaatcctggctgatttccggcgatgccatcatgaaagttaattgcgtgtccagcacctccgcctatattcccggcaaactgagaaaagtttgtagcttcctgccagcttaataattcgcgaccaccatctgcacctcgcccgtcatcccagacacgaatgaaatcaccgcgggcttcaggtaataccagcgaaggaaacactttcgccagcacaggataatcagtggcagagaatttcgcgccgttgaacttcaaaaacaccatactggaccagctgtcgattacagtatttggcattgcagcggacggccagaagaacggaacgccaatagctggagaaccttctcccaaaccaaggtttgtgcgagcgtctgcggcattcgttgcgccggttccgccgtctgcgacagtaaccgcaccgttgctccctttctgcgcaagtttaccgatgcctgggatggttacggcggtgccgttgatggtaactgtgatgctttggtttgctgaggtggtggcgaacgtctcccacgcgccaatattctcgtcgtactctttgatgagctgtgacatggcctgcgccaggccgtcgactgagatattgtccgacacaaggattccatacttctggccgctcagcgccggggaaactgctggcgtaaccgtcattgacgtggcgctgttcacggatgaaatctgaaacagctgcaccgggttagacatcacgataatcgtctggccagcgcggacctggctggcgggagctgtccagtttgtgccggagccggttgcggtatttccgttaatagagatagttccggtgctataaatcataacaactcctaaatttagacaacatgaagcccggagaggtatataaccctcaccagaaataatttctgaattggtttttaatacatgttgggcaacgccagtgttggcatagctatagttgtatcaaatgccattgaccacccacccaaataataattgccgactactttattcctttctgctctgacattcccacctgtcattacaattcctttatacctaatatttccgtaaccaccaacgtgtcgacagttagccccggtataaacaatctggcaaaattcatcaccaatattcaggttcgcattggcgatatttattgtcccatcaaaaatgaatggcttcgtgcaagtaagaagacgtttgcgttgacgattggtttattcaatccatcaactaaaatatcatgtaaacgaattgccataacatttcccactttattttacttactcaacacaacaagtatattaaaattgaaccttgtcaacaacacaaaggagtcccaatgaaactcgctctaattatgctgccattatgtctgtccctcactgcatgtggtaatggtttaaataccggtaaaccaaattccggtgtcattccaaaacctttggatcgagatggtaacggttctttaatttatgataccgaaaaccttccaatgacggggcagtggtgtcacgagattgatcacgaataccgacgaatcggtagcccttctaactgtgttatagactactaaatattaacccctcaaaagaggggttaatattttaacctgtgaatgaaccagatccgtgtgatactatgatagtaggcgaagaaattgacgcacccctgttattttgagcggacactttaatacgcactgttacgtttggacctgttacaaccgcagaatgcatgataagtctctccatgtcttgcacggatgaaccactctcattgccgttaatgtcgattgttcctgcaccattacctttaacgtttgctataacacagacgtgtcttgcgtgcccagaactggatgaatcattataagtcattaccttttctaaatatccgtcactagaccgactcacattcgtccctgtgtgcatatttgcaatgtccccgataaaactttgggcttccacagtccctttgaatttaccgcttgttgcttggatctcaccagtaaagctaccgccactagcatatactacacctctgacggtcacattgttgaattcagcatctccagctttattcaacttccaaccagcagaaccagctgcatagttgttggactggatatagttaccgatttttgcgttctcaatggtgccgtcctggatgaagctggcccggatgaatgtctgcccgttctggatcacgaacggcaaagctacgctatttccggctgccgtggtgacggcgaagcggtcagccaggaagataacctgcgactgcatgccggatggcgtattctccacgccgatacccatccccgcggcgtaatactgcccgttgctggagacaccaaccttgatgttgtacatcgcgctgagttcgccattaacgttggctatagcctgagcgttagtggtgatggcggaggtatgcccgttcacggtcgccgtgatgccgtttatctgcgtggcggtggcctgctgatagtcggagagcgtctgattcaggctgttgatggatgccttgttgccgttgacgtccgtctgcaggctcagcaatgaacgtgctgtggcttccttctcactgacgatcacctcgtcgagacggtccagattcgcgctgttgccggcgaccgatgcagaaagggttttacgcgtggccacctgagcgaggttggcctggattatcgcaattgcagagttcttcaccccgcccgtcatgccgtccatagaaacgctgatgttgtcgattcgctggcccagggcggtatcagccgtcgcaacggtctgctcaagctgactgagtgaagacgaaacattcccgaccgtgctggaaagctcattaacgctggtctgaaccttcccgacgtcctgggcatttttggcgatatctttcgcttgctgctccagttcgtcgttggcctgtttgatatcgttagccatgccagcaattttttcgttgctgtccaccgcgttctcgatcaggtctttgaacgtttccgactctttcatatcctccagaatgtcattagttatttcgctgacatctatcgaggacgtgcccatgatccagtcggtccagtccccggcgttaccgatacggtcaatcaggcgcgcgcggtaccactggcgaacgccggcaggcatggggccatgctgataatctgcagccgggtacggcaccaggaccagcagttcaggattggcgtagtcggcagttgtggcgcgctgaatctctgtataggccgtgtcgcctgagccatccggaaatttccaggtcaggtcgatatgccagaccacatcttcggtcgccaggaagttgagcggagtacccggttttcccgttttaccggagagataagttgtttcaccgtatccccatggtgacgacgtatcctgcgcattcagcgcccgtacgcgcacgtcatagctgcccgaataaatgccctgaaccgagaaaccctgcgcgctggtaaccggaacgtttatccagtccccgttgtccttacgccactgggcaacataccggattgcgccctctaccttatcccatgacacgtccaggcttgctacagtcagcccctgagacacatgatcgctctcagtcaccacgatattcttcggagcagacaggacgcttatcggcgtgacggtgatcgggggagactcgacccgaacgccgtcatcgatgtaacgatatttgtttggatcgtgctgaacggccgtaatagtgaaaccgcctgtactgtcgtcgttagccgcgattgaggtgaccctgaagtactgtattgcgaggttatcactgtctatcgcccaaacagcgcccgccacaggaacctgactgaatgccgtagccaccgtcaccgtttttttatcggcgctcaccgcgctgattgtccgcgtctgggcttttccgtcgggaaggttaaccaccagccggtctttcgccgcgtagtctatttctcgatcgagggtaatttggcggccgttggccgcgcttatacggcccccgttctccttaccagagcggaaaggatcggcgacaccgataatttcagcgggcaaagggatataaccgtccagccccacgccaaacgatacggtcccgtctttggcattggagagcaatacccagcgaccgcgtcggtgcgcttcactttgcgaggtgcagccgattgcggtcagggacgtctgccggacgtcgtaacgttctacaagcgccgaatcgtaaaccccctcaacggtatcgctgtaatggttctgcggatcggaccaggacaccaggcaggagctgtagcgattcttgtatgagccgcccgcataagtaaacagcccatcgataacgtttgagacgttataaacccagtcaacatcgtcctgcgggacgtctgcctggacataaatctgatcgtttccccagaacgttattccacgaaataccgcggcgagatcgttaagtacctgccaggcgtcctcctggctctgaatgaaaacgttgcaggtgaaacgcggttcggtgccaccggccccgtcggaaaccatttcgtcacagtactgggcgattgaatacagcgcccacttatccaccatggacgcatccacgcgcgtgcccatgccgtaaatttcatccagaaccagatcgtaaaagatccaggcagggttattggaccatgccattttgaacccgccggaccatgaaccagaataggttcgggttttcggatcgtaattatccggaaccttaatcagcttgccttttatcttacaggtcactttcggcgcgctgccgttgaattggctgctgtccacttcgacatacaggagcgctgttaaaggataacgaagcttgctgtcgatgacttccgcatacgaaaacaccttgaaggcgttaaccagtttcgaatttgatccgctggcatcagccgtaatacgcctgaccctgacagaccagccggacgtggattttggcagatcgatacggtggtcacgctgatattccgtcgtggtctttccgtcaaacttgccgtttacaaccgttttccaggcgccgccgtccgttgataaatcgatcgcatactcggtgaccgtgcccaccatatcgccattatctttatagagatactggaccggaaggctgagcttgatacggatggcatccagggaaaggtttgtaaactggcgcgtccagggcgcggtggtggtgacagttgtgcccacggccagctcgttgtcgacctggggcatcccggcaatataggtctggtcctgtgtgcccttgcggaactcccatttcacgccgctgaagttgtattccccgctgtcgtttgccagcggcgtatcgttgagaaaaatgttctgagcggtcaggtcgccctgtatttccccctcagaaacggcaatgagcatttttaattttgcgaccgacagcagatcgtcaggctgctcaaccggagtatgtgaactgccacctccccctttggcaccctgcaggatggtttcttgtttaagaagctgcattttttcacccataaaaaaaggtgccgaagcacctttaagttagtggccgctggcctactgctgatcgctcgagtacataccggcgctgactatcgctccccctgcctcagtcagaccgtaggccagggggacaggatgccccatagcgacggtattgaccggcgccccgaaggcgtagttaggcgtgttgtccgtgctggaggatttacccgcgccgaaggatggctggggcgtgagcatctggacaacgccccccagcatcatcgacactccgacccctgtcagaattgacgtggcgctgatagctgttgcactcatcgccgcgccccaggctgccatgctcgcaccagcggtaaagaatgcagcgaccagcgcaacagccccgacaactatctgcaggacgcccgaacttttggccccctcataaacgggcacgatccggtacacgcttccaccgcgggtcatatcaaactcttccagcccgatattgttgccaccgttaaaaaaggcgaaacggatccccttcatatgagcttcagacatatattttttgaatccgggaacctgtgaacacatggccctgagcatctcgcgcaggtcggcaacatcaaactgaacgcgtttaccgaatttttttgccattttaccttcgagaataagcgtcttaaccatgcattctgtccttatgcctgaccacccggaccgttctgtcgcgataatattttccataaggcgttcgcgaagaaaggtgcccgaaaagatgatggagaatgatgttatcacccacatataccgcggcgtgattagtcaccgatgcctgcacactcatcatgatgatatctccgggctgcattgcaccggcggcaatctcaacgaatccctcacgctcccagttgtcgtcgtagagacgctccttgccgctctcccaccattcgtaaggtactgaataattgccgagaacaatgccgtattcgcgcagataaaattcacggataagcgaccagcagtcggcgtaacccagcacccactgccgcccggcataatcccggtcttcacgcggggaaatcgtacaaaaatccccgtccggccaggacatgatcccccactcaatccccgaccagtcgcactggatccggtccagctctgagggcaccagccgaaccacatccggatgggaatgaatgagcatgatgatctcaccgcgcgcgcgggcagcgagctggtcttccggggagagcgtgaatgtctcctcgggtttatcggcaatgttgcggcagggaataaagatttgttgctggcctgactgaacaatcaggccgcaggcttctttggggtattcagcagcgacgtgctgacggatagcatccagcaatttttcacgcatttttatttcccctgcaggtttgcagccggaaaaccgccgaacggcagcggcgcatccgggccgtgacgatcctgacaatcctgccggcggccgccacaaacatctttcgacgggtcatcggtcggtgtaccgtctttggtaaagtatttcgtgccgttgtaatcgcatccggtcccgcttcggtaccagccccgcatacaccaggtgcagacaggcgtaatctgccgtgtcggcagctgcaggctctgaatatcgaaaggagaacacagctcgaaatcaacctgtacccgcgtctctgcggttttagcattgacgtaaaagagctgtaagcgctcatcggccgggctggcacccggattaccgtttttccagttggcggcatcgagatacttcgaaagcgtggtatggattttgaccttagccctgaccatatcgtcatattcaagacacagcgcggtgacatagtttccgacgttcccgacggacagcgtgggcgttggctgggaacctgtactcgataactccatccccttaagttcgtagggatggggatcgtactggtttccctgccagataatggcgggcagattttctgcggcgaaggctgcccacccctcttcctgaatattgtgcgcatgaaaacgcagcacctgatccataccgaattcagtgccgtcgatctcaatcagctgaataacgctgccgggctcaagctgttgtatgtctgccgtaaaactcatactccccccataaaaaaaagccgcccggaggcagctttcagtgtttttcgagaaaatcagggcgcgaacgcctgttcaaaagtgaaggccacagtggcttttttcccggtagggaaagaaacgctgaacgaatcggccttcattctgaacagctttttttcaccccatggagtggtccaccagaacgatttagtaacgtgagacatcaggaaagcgcgcagcgcagccgcctcctgtctggtgcccgtccagtccaggttccacgtttcctgtttgtcgttgatccccatccccgctatctgtttgtagccatccccgaactgggcctgcagcgttcgggctgtttcagtgccctgcgctgtttttcgcgtgcgccaggtaaacgtgtccgtcactgtgtcctcctcgaataaagcacgccgcccgcggacatttcttttttcagtcgctcggtgattgtctgctgaacaatcgcctgcagctgtttcgccgtccccgtggcgttcgcctgatttatgcttccgtcactcccctgctggctgatgctgactggggcataaacactgatcccgcccatgccagcaccggctgcgttcccgccgccgaccagaccacccgaggcatacccgcgcatcaggcgatagagattagccacgccgatgcggctggttgattctttggtgaagacgaattccccgcggtgaacgataccggctggctcgtacttgccgccgtgcccggtaaaaccgcccacgtcaaaaccctgtggccggtatgacgggaccgcgaatgactgaccggcagaggaggttttcgccccgccgctaacccagcccattgcactctggatggtgtaagccaccagcagctggttgataacggacacaatcattttaaggatcgagctggtgaattccctgaagctcgccttcccggttgtcgtcaggctggtaagctggcccgccaacccgctgaacgtagcctgagaaatctgctgaacggagctgaaaacgtttgtcgctgaatcctgatattcggcccaaccctgtttcgcaccggccagccagtttgcacgcagggcatcttcagcttcgaacgtcgccctttgctcttccagaaccttttgctgcgcctgagggttgtacgaatagctttcgctgagacgctgcagcgtagtttgtcgcccggcttcccgggtggataacccctcagactgagcctgcaggcccgccctggcggctttttgctgctgctcaaacttcacggcctgatcggccagctggttgagcttttgctggctggcaaccttatcgcccaggtcggccagctgccgcttgtactcgagcgtttcttctttgtgcgccagcagggatttttcctgcgccgtaagctgacgacgcccagcggcctcctgcagaacggtgaactgattttcagtttgccagagatcctgacgctgtttacttatgacgtcgttcacgctggtatgctgctcaagcgttttaagctgggcctgaagggtgagaagttcggcctgcgccttttcctcggctttgtccccggcgggcgttgagtagcttttgcctttcggtgtttttggatccttccactgcttttcaatcccggcgcgggccgcggcaatgtccttttcagtccacagcgtggcgacaccgtctttcgcatcctggcggtttttctcaataagctgactgagctttttctctgctgaagcccgcttttctgccgccgtcgcgccggactccaccagctggttaaactgctgctggctgcggattgcctgagcctgctggtccgttcgcattttttcccgcgcggctgccagcccttcctgggcgtattgctgatcggcaagatcgtaagcctgctttttcagctccacctgctggcgcgcgtttctcagcctttccgcatccgctttctgcagaacgttgttaccggcataatccgggtcgaccttaagattgctggacagcgcgcggtactctttctctgctgcctgccactcagcaaaagagtcctggcgcttcatcgcggtgtcaggattacgcccgacgcccagcatcgcatcccacgcaccggaggcggcattcttcacccagttccaggctttttcgagggatccgagattatcctcgaccgcaccggcgcgctgaatgaccgcgtcggaatatgcccgcatggccagctcggcagccttctgagaatcccccagcgcctgagcagaagctatctgttcatactgggtggctgtcagaaaatgaagggaatcgttgagcgtcgcgaccgcgttaaccggatcatccttcaggcgtttaaactgatttatggtttcgtcaacggcctgcccggtagcctgctgcagcctggcggcaacattgctgaccatgctgacgtcattaccgctgaacgcgccgctgccaacgacctgcgccagcacgcctgcagcggcatgctgagtgatgccattacctgccagcgagcgcgccagcgcctgcagctgccctgacgttttccccgcgtagttcccggtcaggatcagctgcctgttaaattcctcagactctttgctgccgtcgtaccaggccttacccaacccgaataccgccgcggcaatccctccgaccatgctggcgatcccaagaccgcgcagtgacagaagctggtctatccaccctgcccggttagccagcgtgatcccggagccgcgcagcgcgccgaagttaccgcgcatgacctcgccgatcagtattcccagttcctgccgggcggcggcactttgcagccccagaccgtgcgtggcgactttggcagcttcgagcttgcggatatagacttcagccgcatcgctggcaccgacctgcgccgccttcatgcgcagtagctcggtaccggagagcttttgctctgcaacctgttgcttcagctggctgaggaatcgcgtgcgcgctgcggccgatttttcctccacgatctgcagttctttttgacgggccgtggtgcgggaaataagggcgagataatcctgctgggttatgttgccctgtgccctcgctgcgcgaaagcgcgcctgcacgttcgcaagcgactgtgtttcaccattgagctggcgtacgccgtcgatctggcggaaaaatgatgccgcaagttcatcctgtcgacgggcaagcgcagcggcctgcccgtcattctcacgcatgcgctgattaagctcggtcacgcggcggtgagtttcatcaacggactttgaaacgttctgccagtctttggtaagcccttccgttgcggccgactggcgggatttcatatctgcggcagccgccgcgccagcgtcacccacggttttaaacgcagccgcctgccgctctgaagcgcgctgcattcgcgtctggactttttcagagtcctcagccatcccggttagctggccctttatgcgggcaacctgctcactaaacgtggcgctgtcgacgtcaaggttgatgaccagatcgctaatctgctgggccatatcggatacctcctgttatcccctcagctgcggccatcagcgcatcatcatccggctcgtcatcgctgatgacgataccggaaggagaaagcaggctgaaatgtgcgggggtaagttccgggtcgcggaagaaaagagtggagatggaataaagcagctctgagaaatgcgcatcgagctgagcgtcctgaaaataatgctcccggtagaactggtgccagtcgcccagctcagtggaagtcattccagccagcatggcgcgccagtcgggtcgcccgaactcgcgcgccagattcaggacaaacttcagctcgctggcaagggcttttccgccgcaacgggttctgcgctttcggcctccgctggggcatccggatcggcagctttgtcatcctcaaccggaacgagcatgccggagagcagctttatttccatttctgctttaccgatcgcctccggcggccagccgctaagcacctgctggtaaagcgtctccacatccgtgccagccggatcgttatgccacaaagacatcgcaatcaaacgcgcaccgcagcgaatatttgagccaatcagcctggccgtcatttcctgatcgctgatgccgtcgctgtcagcgctgacggccttttcctctgcggccataaacgtgatgtactcaatacgctgaagcgccgacagctcgaagatggtcagtgattctttttgccaggtgaacttctcttttttcagaaacatgcgtccttccttacgctgcagttacggtaactttgcagaccgcaacgaaattaccgtcgctggtcataacaataacgtcagcggtgcctgccgccacgccggtgacggtgatcgcattaccgctaacggtgaccgttgcttttgccccgtctgaggttgccacacggaacgaggtatctgaggcactggctgggttaaccgtcacattgagcgttgtggttgcgccgacggccacgcttgccgtggctttatcgagcgtaacgcctgtcacggggatattcggggtcccgctttcttctgccagttccggcttgccggtattggtaattttcgctgtacgggttatgacctcttttgccggaatggctttacccaggctgctgcaccagccgcggaaaacgtcgacggtaccgttcgggtatttgattttgtaatagcgtactgagccatcaataaaccatgcgacaaggtctttttgcccttcttcgcccggcttccaggcgagggtgaacgaggtatcgccagcagattttgccccctgggccgtcgcgttccagtcggcatcctcgtcgtcgaggtaagtgtcgtcatacgattcggcggtcatttcgcccggcgtcagctctttaattttcgccaggcggttccagtcgatatccgagagtgggttagcgaaagcgttgcccgttccggtgtaaagccagagggtggtaccggcacctttcacaggggccagcgggtttggagtaggcataagtacctcttaaattgaataggtgattaagtacgtgaaatcgactgaaccccaggtggccatttcatcatcccgctgatagtcataaccctgcggggtgaacgtctcgaccagttcggtcagacctgggatgaaggccattgccggatacactttctcttccatccaggaatcaagcgcgctgtcggggctggaggctttaagaaatacctcgatgtgaacaaccgcctgccacgaatcttcgtcaagcgaatcgccggtgtactccgcgtcagaaaggtatacagccacggcagggagatcctgctcttcaagaaaaacagggcgcccgtcaaaccaggtgaccgtgtcggtgatctcggctttcagtttggccagaatggctgcacgaattgcgctgtgtctgttcatcgcttcaggtggatcctcagttggtttttcagggctgcggaaagttctttgggcatatcgctttcaataaggcgctttgaaatagcggtgaaggccacggtgagcggtgtctcaagaggaactttgaccacatcaatcggataacgggcctgacctacgcgccgcatgacctgccagcgcccgttcgcaagctgttggataaaagcgttacgaaaggtatagggcccgattttaaggacgctgcccgctccgtttctggccccttttttacgcgagagcctgacgcgcgccgtgccgagctttatcgcaggaagattaccgcggttgatttttatcgacgcgaccgggcgatcgtgacgggccttgcgcagacgggaacgctggcggaccagacgaaccggaagcccctttttccggttatcatcaactgttgcttctttcgctacagctttgctcccctggcttatcgttcttctggccaccctgttaagtgcttttgcggttgcctcaggaacgattaaccggctgaggctgttcaggttctgaatagccctttccagtcctttcacagacatagcgcctcctcattcgagatggatgcggggttttccgttgaacatgtcatagcgggtaacgatcaggttcttaccgtcgtagtcgacgctgtcgtttcggcgtggctggtaaagctcagagaaaaccaccagcgaagtacctgttcccgacaatggccccatttcctcgagttgctcggcgggaacaacgtcatagctgctgccattgatgatcgctgtctttcccatcttttttatagtggccgcgtccatgcgcgccgccatccggtcaaaggagttaggcattgatcttaacttcaacaacggtggtgtttgcccctgcatcttcccaggcgatgcccgcggcaacggcgtccgtttcttcgatcgtgattttgccgtccttcagatacacctgcgccccggcagtaaccgcatctgcggatacttttggcaggaggaaaacaccctcagtaaaaccgtccccggtatcgccagccgggatatcggtaattgccaccgcgataagttttccaacaacaaccgggtcgccgctgtgaacatcggttgcaccactgtttaccagagggatcgttttcccgtcctgcgcatagttcttagccataacttctccattcagcccctttcgaggctggtttcaggtataaaaaaagcccttacgggcgtctgtttgtcaggactgttttttactgaccagaggatttggtcatgccgcgatagtccagcggcgccacgccagcatcaatacgcactttcgtggcgataccatcagtggtgaagccttcctgctgatcgatgtatggcgtgtcgacgccgttgagataagcgacctcaatggtgtcggtgcccttcgcggcagccagataccaggctttcgcatcagcttcatccagacgtggttcggcaatgacttctgcaaagttctggatagggttaacgatcccggcattgatgtctgcacctttaacactggccgacttgatggtctgatttgccagagtttccagggcgacgggcaccagcatgtaggccggacggatattcagggttcgctccccctccttctgcagacgcatcagcttgcgcgattcgtccaggctggccacagaaattgcacccgagctcaggttcttgtgatcggcatggaacagcgcctttccgtctgagagtttcgggtttttggtcagaatggcgtaaaccagatcgccaatcgttgctttcgccgcgcgccccatcttcatcggtacgtcggtaagctggttcagatcgtcgttgatgatcgcctggcgagttactgagaagatttcaccatacgtggcaagcgcgatggtttcgcctttgtcactggtagtgatgtacttgtactcagccccttcgcgaacctgtcgcagagaagggaacccacccataccgacacgatgcgccgttttgaagtccgacagctggccttttttggtccactgctcgaaggtttcctgcgcctcgtcccagccctgaatcagcgctttgttcgcaacatcaagcagaatgttgccaaagtcagaggtgctgtgggtcagcgccaggccaaccatctgcatcgggttgtagctggccacgccgatacctttttctgtcagggccatacgcgcatactcgcgcagcgtcataccgttataaacgttatcccgctcctgaccttcgaacccggcacgcgccatcagtgcctggcgaataccatccgcgacgaagttaccgttgcccgcatgaatatgcggctgagtggttttattggacggcgtggccgttttaccgagttctgccagcagcaaatctttcgccttatcgacggagcaatcagggtcggccacacactgattctgcagttccatgtgcttattaccgaacatggcaaagagatcgccgatagcgttaacacgggttttctgctcagccaacacctgcgcgcggatcgcattttcatccggtgccgggtctgtttttgcctgcggtgcctgaggctgggtaataaccgggtcacgctgggtagtgttgcgcggcggggtgatcatgttgcgaatgctttttggcattttttcaaattcctcaatacgttttgaatgaatacaggccatagcctgaagggatggtgtcacctggtcggcaaaacccagttcaaggcactcgctgccgttcatccaggtttcgtcctccagcattaccgcaatttcttcggtggattttccggttttctgtgcataagccgggataagaacggattcaaccttgtcgagaagatccgcatagtcgcgcatatcgctcgcgtcaccaccagcaaacccccagggcttatggatcatcatcatcgtgttttcaggcatgatgaccggattgcctaccatcgcaatcaccgaggccatggaggccgccagaccgtcgatatgtacggtaatcgccgcgccgtggtgcttcagcgcgttataaatagcaattccgtcgaagacatcaccaccgggcgagttgatataaaggttgatgtgggtgacgtccccaagtgcccggagatcattgacgaactgtttcgccgttacgccccagtacccgatttcgtcataaataaaaatgtcggcctcactgttattgctggcctgcatgcggaaccacgaattactttttgcgctggctttcggacggtggcgcgcccggttctttggcttcggcactggtgcctcctttatcattggcggggtcggtgtcaaacaccaggccctgttcacggttctcgtcaacctcagctttacggcgtgacttaacatcatccgggttgcgaccgctggcacgtatccagtcggattcagtagcagcaccgccgcggatctgcgttttccaggcattcgcttctttaacgggatcaatccacggcataacgggccccgaataaaccgcgttataaagcgagtccatatcaatgcctctcggcagcttgatttctccggcagcaatagccatcttgagccaggctcggtacatgggccgggtcactgaaccgatgaaccagtcctgaagaatcagatagccgtcggttgactcgacaagctcctgccgctgggcactgtacgttccgttgtagtttctggatgtgctggaaaagctgaggcgactgccggcggacacggcacgcagctgtccgttacgaaaagattcgaggttagggttcgggcgatcggatttaatcatcccgatttcttccccggcctgcagttcgtcatagagcataccgggctgaatcatcagctcgcggtcatcgctgcttgaatcagaatcgaagctctgtccgtcgccttttttgatatacatgccgagtgccgcagcaattctggcagcagtaagctccgagtcctcgtattctttcagcgcgctcagacgcatcagaacaccagacaaaagagacgttccgcgggtctggtgcaggcgtcgggtgaatttgagatgcagcatgttctctgcatctatctctttggtatcaaactgacgcccggatactggcaggcttttatagacctgatattttttcgggcgtccccagttatcgacaaaaacgccctgattgagctgggtggcagcatcgctgttcatcggcacaaagtccggctccagcgcttccagccagaacggcacgccagcaaccggctgaagaccatttccggtaccgcgaaccagctgagcaaatacctcaccgtcccggagccacgttcgcagcatcagccgctccagcattgggcgggtaaactgggttgtgacatctggccttacggaccattcgccccactttcggcggatatcagtggccagctttttagcgatcttcccgttactcagcatcggatgcggttcaactatgatgcccttcgcacccaccaccctttcttccagcttgtcgaaaacgccgatcaccagatcgtggttgttatccagccagcgcgcctgctgcctcagcgaaaccgcccccatctggctgagctgatcggctgaacgattttccttctgggctttgtgggtacgcgtttgctttaccgcctcatacgctttaataactgcgcgggcacgcaggcgtgaggctttccagcctggtgaaaacaggccaatcgcatcatctaaaaaactcatccaaacctcgccagcctgtagccgggtcgcccacggcgtttgttattgagcgttgccagtcgtcgctcccattcctgacggccttttctgatttccgacaggttttcgagcgtcatctgctgcccgttgaaagtgattgatttcccctccagaacagacagctcggctgcagcatagcggtcgatcatgttttgaatatctgctggattcacacccaacctcctgacgaagaccacggattagcctgctcggttacgggcttctcacgttttggttttggtttagatttcggcgcaggcggcggggatggcatttcgccagcttccgtctgcgtgtcctcgatccacgtttcccgccgtgcccactcaggagctgacggccatttgattttttcgtaaccactaaggatggcgagcgcgtcggcataaacgagcaggtcaaatgcttcgtttgcgccccggccgggcttactccatttcccttcattcgagcgttcctcatacgtcagttcgtcatagaaccagctgcccagccaggcggggaaatgcacatagccagggccgggtgaatcacgccacagcgcattattcacccggtctttaagggcatcggtctggagaagataaagaggcacatcaccagtcgcctgtgcgcggcgcgttgatctgcccgtgttgtcgggaaacgttcgctggataagtttgctgcgcctgacgctgtcccctttgaagagatagatacgcttacccagcccctcacggcgacatctgcgccagaacttgtaggcattatccgtcacgccatcttcgccccctgagtccacggccatcgacatcagccgcatgccctttgatgggtcagctgcgagcggccacgttttatcaaagacgtcagtgagtaaaagatcccagtcctccggatagctcgccggatccacctgaatgctttcaccgttgccgtcgcagcgcagcgaatgccggatgttgtaacggtcaactatccagcgctcacccatacttccataacccgtaatctgcacaacaaagcgccggttgcgcccggcctgcacgtccacggtcgcagtgagaaactgcacgccgttcggtaccgaacgttttgggacgtcttcggcacgctgctcgagcaattcacttttacgctgctccatgctggctcgcggcaaatagggcctgccgaaatcggtgttgatcaccgtcttcagggtttcttcgctgcgcgtggattcatattcctgctcggcggtcagaaacttataaataagctgcgcccaggtctggtaagcagctgccggaccttccatccagaaggaggcaatacgggaacgacggccatcaccgctaaccaggcctttcctgtcgatggtttgcccgtcccggagccagacacatttcatgttaagcgcacgcttcatgtccggtgtgatcctgcctttacaggcagggcactgaagaaacgccgcttcgctggcaagcacaggatcgctgctgtcgcggtatccggtcatattgtccatttccggctggaaatattcgccgcaatgcgggcatggccagtaaagacgacggcggtcaccacggttatagagcgataaaattccggtggtcggaggggcttcatggggcgtggagcgccgccattttgtgtctctgatatccctcccgggcgagctctcaaccagcgtcatcccggaggacatgaatgtcgtggttcgtttcgatgccagtgaaaaagcatccccctccccgtcgatatcttccggaaagcggtcataatccgtcagcgccacacttttatagtccgaggacgacatgatattgacggatggccagcccagcttcagatagttaccggcgcggaatgtacggtcgtagacgttgttatcgttacgtcttgggcttagccgggttttaacttcagggctacagcgaaaagtacggtccaggcgttttttggaatgctcgcgcgctttttcctcagatacctgaattacaagcatatctgccggatcgcagacaatgttataaacgatccagccgtcaatcagcccgatggttttacccgttcgcgctgggcccacaaacacaaccgcatcgtattcacgcgatgccagacagttcatcggctcaatcacatagggtgccagatccggatcccacggaactgagtttcccgcccccattggcacgcgcatataagtactgaccgcatcggccaccggcatacgacgcggggctcgtaaaataccggaaacatcgcggcggatgtccctggcggatgcccgctttgccatcagtcctcctcaggctgctcctcctcttttccagcgtcctgcaccttctccgccatctggtcgcgcagatcatcgataacgctttgcacacgaactaccgcagcaggcgttaaagcacagtcgcgctcgagcacatccgggagggtttcaagtaccatgacgacggctttcgccatcaatgagaattctcgcgccacttcatctgcgggtattaactgccccgtatcctgttcgaacttcagcctctcgttctctgctttccagtgggacagcctgtcagaagggggcatatcgtcgatgttggccgaaacggtagggatcatcagttcggtcagaatgtcggtcaccagatagagctttaacttgctattgctgcctggagcaggttcaacatttttcagtctcgcggcaaccgtctgacggtgtacgccggttatccctgccagctggttgatattgagttttaaagtggcaatttcctggtccatgatggtgaacactttttgaacgattcgacatgttgcgaaaatggcctctaattaaatcaaagacctgcgcacatgatgatgatgaccctggatccgaaaaactagccgtttcccgcgagcacgccgccccgtggcagggtccccctccgggagtaccttttgataataattatcaattgcacactatcgacggcactgctgccagataacaccaccggggaaacattccatcatgatggccgtgcggacataggaagccagttcatccatcgctttcttgtctgctgccatttgctttgtgacatccagcgccgcacattcagcagcgtttttcagcgcgttttcgatcaacgtttcaatgttggtatcaacaccaggtttaactttgaacttatcggcactgacggttaccttgttctgcgctggctcatcacgctggataccaaggctgatgttgtagatattggtcaccggctgaggtgtttcgattgccgctgcgtggatagcaccatttgcgatagcggcgtccttgatgaatgacactccattgcgaataagttcgaaggagacggtgtcacgaatgcgctggtccagctcgtcgattgccttttgtgcagcagaggtatcaatctcaacgccaagcgtcatcgaagcgcaatattgctgctcaccaaaacgcgtattgaccaggtgttcaacggcaaatttctgcccttctgatgtcagaaaggtaaagtgattttctttctggtattcagttgctgtgtgtctggtttcagcaaaaccaagctcgcgcaattcggctgtgccagatttagaaggcagatcaccagacagcaacgcgccacggaaaaacagcgcataaagcacttcattagcagcgccagatagcgtaatgattttgttactcatggaatatttccttttaggcgtgagcctgtcgcacggcaatgccgcccgagaggtaaacgcaacctaacggcatcacccaggctcactactgaaagactctctttgatgtgcgcgtgcgatgcgcgtagaagactgatttatcaacctgtctttatatcaggattcattacctgactatttgtgggtaaagttcgtagtgcgctgatcgtgcaaaatgattttagttgggaacagttcgcaactctgtcccataaaaatcagcatattcccatctatcccatatccagcgcattgaccatcgggatactgaagggagattccatcatctcttagaaagatcaccatctcttttgtttcaatttgcatatagctacctggaggatttatgaatgcaaggattttcatggactattaccatgagattgattttccatctttattcgcgagagcagtggaaagcgatgacgatgtgggtactacattgcgcattcacctactttgtgagcgcatggtcgaagcatggatatgcgcatgctgtgactgccaagatctctttggaagagataaaaacaaacttttaatcgaatgtaatactaaaatatccatggcgggaaacctgggaatccccccggaacttatgaaatcacttaaaaccatcaactcaatgcgtaatgaccttgcacacaatccatcaatacaaagcattgctgattcaaggatccagagcctgaaggatactctgactgaatactttaaacagcatccaacggaacccagcatggaagaatcaaaactgggtatttttaacgccgagaatcaattaaccgaagaagtttccttagatagtgacagttcaaaaaacagacttaagttaatcttgctgttcagcaagttaatgcaggcgttaatgcaattagttgcagctaatcataatgggcgctgggataaccaatttagccaattcgtttaccatgtgaccatgaacgcaacaaagagataaatccaagcccgttttgtacgggctgttgcattatcacaggcactcagtgaatgcctgctgtaatgccgctagtcgtcgagttgcaacacaccgtgatccagtgattctgaataggcgataagtccggtataaccggggataatctcaccattatcagcttcaaattcaggaattgtgccggtggtgatggtgtattgaggctggccatcttccttcgcgaaggctgccaggtcttcaatctgcttagctgtaagaactactgtcatgctcattcctcagttgtaaaaaagccccgcgagtgcgaggcgatttgattgaattctcggctcttatctcagcgcagccccttactgcgtgccggttgctcggtgatgagcatcagcgatgagacattaaagccgaccgaaggccagcggcgttcctcatgttgccgacagagccatatcgacaagaggacgaaaactagcagcatgaatcgcctattggttattcgacagtcgcactgattcgtaaatccgctcacacgtcattcctgcccggtagctttcgtcagatcgtccagcataatatcgagctgcttctgcaaggcttccgagcatgtcggcaagcattgctgcgttggctccggctgttttgcttctgacggaagtggcgagatctgcggtgtgctttgcggcgtccatgtgggtagcgagttttgttgcttcggcgcgcagctgcttaacagtggtagccaggccagcagaagtaacggcagcgctcgctgcttgagcttgagcatctttaacggcctcatcccgggcgattgttcgcccttgttcaatcatacgagctgcggtctgtgcattcgcttcctgtgaagattccgcgctatcccggtcagcccactttattttccagctgcggttcgtccactcactgccagcgagaaacgaacctaccaacgcaacaatcacaatgatgcagatgccacccggcttcactggtctatcccccagcacgtcagtgcgctttcctggtcccgccgttctacctgcccataacatccatccttctggcccttggtcaggcggcaatcgcggccaccgtctttaatccaccagcggatagcttcacaggctcctttcgtatcgccagcattaattcgcttatagaacgtagacgggaaacattttccggggccgatgttatatgggcagaaagaagcgatacccgctttctgtggttcggtcagtggtactttgatatttcggtcaacccacgccagcgccttgtcgcgttcaatggcgtttacctgggcgcatttctcagctgacagcttcatgccctgtactactggcttgccatcaaccattgttgcaccacggcaaatggtccagagtccgccgccgtcgcgatatgctgtcaagctgttaccctctttctcatccagaaactgatcgagaatcacgggtgcggaagccccggcaagaatcaaaccaacgaccgctgcgctcaatttattcttcagctttagagacatagccattgcgccgatcctcccgttctttccagcggaaataccagttcactgcacaggtgattaccgtgcatgcgataccgacaataattgcccagtcgctcaggcttaaccctgcaattctgtcggccaacatccaggacacctcttttgctgttttagctgtttcggcatatgccttcgctgatacaccgcagccggcaagcgtggttcctgatccatatgaaagtctgctgtaaatggtgctcattctggtcatagcctcacctccgatagttcggatggcgctgtgtgtgattgaaggggatcaggcaaccgggctcttatgttcaagtaaaaattaaggatgattcccggtgcctgaagatggtgatcaccacagcaacgggggagcgtggtgatcgttatgattttttcagtttttccacctcttcggtggtctgtataaacctgtctgcctccagttctacgccgatcgcccgacggccaagttctattgcagctttcacagttgaaccagagcccataaagaaatcggcaacgatatcccccggtctgctgctggcgctaatgatctgtttcagcatgtcggcaggtttttcgcatggatgtttgcctggataaaactgaacaggcttatgtgtccatacgtcggtataaggaacaagagcggaaacagagaagcagcgccgaaggattttgtattcctccagcaattctgaatacttgcggtttaatgactggtaggtagccaccagctggtggtgaggatgttcaagcttttgctgaatatgtttatcgatggcgatccgcgtgaacagttcctgcaattttcgatagtccacttcattcggtagttgccattggcttgcaccaaaccagtgtgacgccatgtttttctttccggttgcctcagctatttctttcgagctgacacccagtgattcacgggcattacggaagtaatcaatcagcggcgtcataatgtgctgctttagctctgtgcttttcctttcgtaaacatcctctttacctgtatacggtccaagatagtgctcagcaaacaaaatccgttccgtagatggaaagtacgcacgcaggctttctttattacatccattccagcggcccgatggttttgcccaaatgatgtgattcaaaacgttgaatcgggcgcgcatcataatctctatatctgaggccagtcggtgaccgcaaaacaggtagatgctgccagcaggtttaagaacgcgagcatactcagccaggcagctatcaagccagcgtaagtagtcctcgtcccccttccattggttgtcccagccgttgggcttcactttgaagtacggaggatccgtaactataagatcaatagagttatccgggagggtggcgacgtaatgcagactatcagcgttgattaactcaacactgtttatttttacagtatttttcatagatcagtaagcgtaactctgataggctcacgttgcttttgcgctaaagcagtgggccttggttagcttgtgacctgaaagcatgagctgatggctggccgggtgcgctaacacccaccagccgcccatttccacagcagaaaacccccattactggaggcgtttataacatccgaactggtaatcagataaccccgccatcaccagctgcgtaagtatgagctggcaacgttcgtggctgaggtgggtattctgtgcaatctccccagccgttgctggtttatcgcttaattcattgaaaacagcctttgccgtttctgtcatatcttcctgatttagcatgtcttttacctaaaattagttgcgtgacatacagataactctggttggtgataccagcaagagaagaatttgattctgcaaccaacaaggcctttaggcatcaggcaggaatgagatgcaataaaaaaaccacccgaaggtggtcttatatgaatctttaacgcggacttagcaaatattccacatcatcgtactaccgttatggttttcgataatttttgcggctgggctagtaccaaaagagtgcatatagcaatgatgaatagtaaggaccagatcctgcaacgtttggtcactctctagctccatgatatttaaaccaatattttgagctttgtccaaatgaatatgtctggcatgtgcatacgttgcttggtggttgtttaactcatcacatatacgcttagccttagcttcagcgtcagcctgacctgcgaacataccagtacaaagccatttctggacaatttcgttcgcccagagaattgctttttcacactcgccaatcaacgttggatttagtttttggaacgtaaattgccaccattgcagtgcagcagggttggcaaaaatttccgcttttgctctctcatactcctcaataattgcatgagatgataacccattaaactgtggatcaattggccccaagttcgactgtttacctaaaacgatctgctcagcacaacaagcaagcattgtgccacaactcattgaaatcataggtacaatcgctcggatattggttccgaactttgaacgaagataatgaccaattgattctagagctgcgatatcgcctccaggagtatggagtaagatatccaatcccagactcgtatctaacccattgatagcagacataagaccatttttatcatcatctgacatctggatcagatgttgaaacccaggcccccctttttgaaggaagcctgagtaataagaaattacatttcggccagtatgtttcgataaatcacgtaagtacttgtggcgaacctcatccgctggtgtacgttgagcgatagtacccatctcacccaatacgtctatccaatttggcatgttatcaatttatcagtatgagtacagttggtgagattgctgaccgttctgctcagtagtatttggtgttactgtgctgtatgaatagagcacaccacttctcacattcagatcgttttgctgagcgagaacacgcatagcaaaatgctgtacggattcgcctttttgaaactcttggggttgtatgcccattttttcgtaaaattcagcagcgctcatgatatgtccctcgtttttttctacatctatgcaattccaggagccatcaacacaagatgtagtagttagcagtcgtcaaatacacgaaaagcctcaagatgaggcttaaaaagattctttttgataaagatttagccaaactatagcggtcaaaatgcagatttgacaagtataaaaagcacttaaagcctataaataggcagtttttgagaattaaagcatctttaatgaggttgaacaaaatgcagtcttgacgctgaacaggactttactggaacgtagagctaaatggttcgatttcatgaaccagttacaaaaaaacccgctcatcggcgggtttataaaactttggcaacatatcaaatatgcttcaaatatggcttattttgttgcattttgcaagcgtgtttgaaggagatggtgaaatttacttcacatttctgccactttgagggcttcttcttcctcatagtattcaagagccatggccaacgcagattcatcaagctgggtaaaagcggcctttaacccagcccagtgccctgaatagacacgcaaccatgtcgaacggtcaacgctaaccatgcgggccaacgctgcaccagcatagtctttataggtttcattatttctggttgcggcaatttcctgccctgccagccataccaggcctatcagtttctttactacgcgctcctgaagggagttatcacccaggcatttctgataagttttccagacgtattcacacatcatcacctggtgcttatagctaaggtcaaaaccgtagcagtaccgcaaccaggcctgctggtatccactaagcgcggacactgccctacgccacggcgcggactcaaattccgcatcttttatcggcggcattggcctgcggcggctgcgtgtttccagcacatacagtggcgcggaaagtgagttaacaaagcgtggccccttctctccttcgagttcgacgagatgaattccacggcgaggggtggcatttttgtctgctggtgggtgttcactgaaagcctcaagctgcccttttgttcccccagacaggtcaggtagcgcgcggcgcaattctattcttacaaaattcaggtcttgttgattcatgcttctttgcgctccatacacttaagctttcgcaattacgccgatcgccagcgcccgatccataaaacgcagtagcagctcaagctgcgtaccatgcttctgctcgaatgccggtacatcggcgtgtaactcgtcgtggcactctctgcacagagggatcacgaagagatcatgggcttttgttgctgtcccccccataccgtgccctacgatatggtgcggatcatctgctggccgtcggcaacactcacagggttgtgttttaacccagcgggtgtacgtctcatttatccagcggcgtcgctttggcctgagcatgaaagattctggagactccggatcaacagagagcgtgaggatcttcttcgccttctcctgcacgaggctggttgcagaagcggaaggcacaatgtcgctttccctcatgaccgagcggatcttatcatccggaaggcgtagccccttgtgcgcaacgctttccggaataacatcagccaggtcgtttctgaccatccaccagcacagttccggaagcgtcaggatatgcgactcgggaaaaccagaatcacgccgaatgacttccagaatccaggataccaggtttcctgccgctatacctgcaagctgttcggtatgctgccccgacaaagtgtgatcgcaatgccagcacaggcgaatacttcctggtgggtgccgcattgttgtgaagttcttgtcgtgccacgatgaatgtggccactggcattcaaaccgattactcaaccattgctcaagggaaggaagcccaccagcacgctgaataacccgatcattctcgaagacctgccgcattaccggatcatcagccagcggctgaatggcggcgggaacagctcctgtactgaatgacgccatttcttctggttcaggctcaagcagaacgcgaccgcgcataaagaggtgcatcagttccgcgccgggacgaaacaacacaatccccatacgatgggcgatctcgggggtaagcagagctctcacgcgacctgccccctggcaatgtgttctgcccacagtccaccaatccagcgcacgcctttcgccgtgaaacgtgcctggctgaatgcatgatttgaggttacggatgtgccggttttcacttcaaaacggcccgcatcaatatgctgatgccgtggggtcatcgttccgccaagacgatacatgatgtcgttctcaaggaggaataaccgcagatcgggctctttggccttaagcagttttgccacctggcggaatgacattgacccactggctgtacagtaccgatcaacaaacgctaccttcggcgccgcggcagccagttcgttagtcaactgctgtttttgttctgcaaggtcagctgcaagacgtagggcttcagagaatgattgaggaatcgtctgctgctgtgcctgctcaagctcctgccagcgatcaaccagacgcgcggtaaactccggcgacagctgcgcgacaacgatataactgtcccgcttccctatcagataaaccgataccgactgattgaggtgatttttaacttcccccattggggggagttcaataacaccgcgctctgccaggcgttcaatggaccgtttaacatggtcatgtcttgattccaccagctcagcaatatcgctgctggacatggttaacgctgttgttgctaactggctcatacttttctccatatcaggcggctgcacccgccggttcatatctgctgattgttatctctacccgacctttcggcacaacgggtccccattccaccagcatgcgcttaatctggctgtcgtcttcccagacacccgcatgcgtcagcgcgtcaaacagggctttgttgtaattatcgatatcccggcggcgcgcatccggcgggtacagagtgatttctaccgctgccagttcagtcgatggcttcgggagacgtcgtaattgctcaatgatcgccacgcaggcagcgctctggtatttacggccagcggcgctaatgaggtgacgaccggccagcggccccttgttaggggcgcgccagtaagtgttcacgctcggaggaaaaggcaggatcagtttcacgcggcctctccccgcatattgcgaacaagttcagaagcagcagtaatgatttcgctggtggcagtccgctccagccagagttgattgatattggctttcagcttgtgttgcagtgactcatccagcatgtcagcaccatccacctggtcgaatacaattctaacctccagcggccagatacgggactcgggaagcggatccgatactggtttagctttctcacgaatgtgcatgcggatctggcgaatattggaccaactggaaacatccaggcttcccatggctgcaatgaagtcagtgctgttcatgccatattcaccggatgcttcaagggcaacagtgcgaatacgttccgacatatccaggcgcacagcagcgtcatcgaattcaatcgacaacagccactcatccacaccgaacaaaatactctcacgaataagcagcttcgctttgtcgatcgttaaaggtgatacctgagtgaattccggtgcttcgacagaatccgccgcccaggtatgcccaaacttcgattcactgaatgtgtattcttctttatcgccaaacgcagctctaacgcatgcccacgcctcgacaccgctgatagcaaaaatatctttctgggtgagtggcaactctgcttctggcttatcagctgcaggaggtgtggcagttacaggttgagacttgctggcagcaaattgtgccaaagccataaacgcccgcccttttgcctccagttctgtgcggttgatatagctgaaccgctcgccacgccatgacttatcgaatacagctatggcaccggcaaaaaacgcgctggtgggtttctgtttttcgtcagcaggtacaaaccacacaggcagatcgaacccaatgcgcccgcgaatgaatacaatgtgatcggcatcttccggccaccacgtttcactcggcgcggcttttatcaggaatacatagcgaccgcccttctcgcgctgggctgctgcgtagttcatgatgtgcgtcatgccggtgatcgcctgcttctcgtggtactgcgaacggctatacggtgggttgccatagccagcgccacccagttcagccagacgttcagaccagtcctgcgtcagcgcgttatcttcggcggtgtaccatgccgggcatttcgcgttgtcgtcgtcagcaaacaaatccagaactaatggaccaaatagcgcgttgatcccccaaaaaagcagatccggtgtccgccactgatcgccaacctctttcaattcgtgagctggtttgctacgcagtgccgccagcgcctggcaatatttattggtcatcatgaacggaaccccgaattttctggcagtgagtaatcaacactctggaagtttgcgcggctggctgagttagtctcccatttgccgttaacgcgttcaggccggccagcactggaccatttggtcgcgctttgcaggtaaccagggaagttttttggaatgaacagagttgccgggcggaggtattgcgcctgctcgctatcacgccaatcggcatttttgtaatccactaccaagcacaggtcatcaacagtgaattgttcccgaagacgggcgcgaatattctccagcgacgtgctgcatacctggtagcgtgagccagtagtctgattcaggtaagacaaaacctgtctggcctgatcagtaatcacaacctcagggtcgggttgcgccgcaaccggacaagagggttttgaagttacttgtggttcttgttttgattttactgacggatccccaccagattctgacgggtcaaaaccgccttttttgctggatttcgacgcctcaaattttgacgggtcggattttgatgcatcagattttgatgggtcagattttgatgcgtcagattctgacaggtgagaaaaagcagcctctcgcaacttaacgacgttaagctgatatacgttcgatgcgttacggttcccattacggcgctgcttacgggaaagccagccatccttctcaagctgagcaagggccgtccttaccgtactttctccagcaccgatttgacgtgcgatcgtgccaatagacggccagctaacaccctcatcactactgaagtcggccagacgcgccatgatggcaacgctggataacttcatgcctgacgaagcgcatgcatcccatacgtaaccggttaatttagtgctcatggtcgtcctttaattctgtaaatttacgctggaattgttcaagagggctgaagcactcatgatcgtacccttcgcgaaggtatataacgcgctgtgtatctggctcccagcggacaactctgacgggaactccgtagtgatctctgaaccgccggttaacttcagccattcctcgcgccccttctcgttcatctgaacaaatgcttctaccatcaagtctgctggctggtagttgcctccatcagccgcgttatttatgatttccacatagccgaactgggcatctttacccaccagcggcaaacatctgaattgcttagctggtctgaatcggtttacactgttcatgcgttagtttctccactgatacgacacgccaaggcgcccggagctgcacactcgcgggcgtcaccttttctgcctgttgaaacgaatacgtcaatcgcctgatctgaaacaccaaccccataaagcgccataaatcccaggaacccgtgaatctggtggcggagcttcttactgaataattctgaaagcattttgcgctctgatgaatcaattaccccatcagccgctgctgccatcttggcattagccagctcaccagatgctgctgccgctttcatctcaatgctgtacagctcaacgttatccaggctctcagcagttggaacatccaccagccatttcccttttcggttcgcctggtactcggccaagtaacaagaaccagacaggtcctccatccgttccagttctgccaaggtaaagaaccgactgccacacttctggtacaggtggttgtggaactggtcgatagtcatccctaaatcggaagccatacctaagcgaccatgcttgtgtgccttacacatcaggcggattgctgtatttatgctgtctaccatgttgatttccctctggtagttaataatcaacttaaagttgactattgttgttagcggaaggtatgccgtcatttttgttcggataaatatcaggtcgtaattgatggggagttactacccatccgccccattggcagagttgaataactctttcagaaggtactcggttctttgcaatccagttcgcaacagattgaactgattggaattcaaaccgccttgatacctctgaaatcgacccgatcgccttcacagctttagctgttacattcttgtgttgagatgacatgtgttctcctatgactaagcctgcatcaatactacttatagtagcaattattagcaacttaaaatagaaatgacaactatgccttgtgcgcttaatcttctacttatggtggaaaatgctaaatacaaagactttgccgaaaggctaaacaggtctctccaagagcaatctattggagttaaagaattgtcagagttcagtggtgtctcgtatgagatggcgcggcgctacactcttggtactgcaaagccgagagatgagaagatgattcgaattgcagaaagacttgccgtctcaccggcttatcttgattatggtgtgcctgttaatggtggcgacgcgccagccaaaggcacggtcagaatagagcaattggatgttcatgcttcagccggttccggatatataaaccaaccattccctacaatagtgagctcaatagagattccagaagagaggatcttcgagttgtttggtcgtagaagccttgatggcatcgtcatgataaatgttgatggcgatagcatgatgcccacgctttgcccaaaggacctgcttttcatagacagcaaggttgaacaattcagcggcgacggcgtttatgtgttcaattttgaagacagtacgttcgttaaacgtttgcagaaggtaaaagggcgccgactggcagttctttcagacaatgaacattacccgcccttcttcatagaggagcatgaaatgaatgaactatacatattcggcaagctaatcagatgcttacctctaaaaatgatagagtttggctaataattaattcatcaagaaaccggcgaaagccggttttttttacgcctccaattcctcacctcataacactacactactaaaaatttcattttctactttttgttgttgcaattatctacttaaagtagctatagtcattgcatcgaaagcgaacaggcaggacgcccacgaagtagccgccggtggcatatgaataaccggatgattcgctgacagaaaacttaggttgggggtagaggtttacatgaatcatttattcacatgctcattttgcggagcaaccgaactgggagcgataaagatcgtcgcaaaaggtggtaaggacgaacctgccatctgttcggaatgcgtagtcacatgtgtagaaaaaatgatcctgactaaaaaatcagaggctgaaaaaccaacctctgataacgaaataatatcagtcgataaaaaactatttaaagagcttcttcagcttgtcctcaaccttcctgatttcggaagtaagctggctgctgttgacattgatagtagctccacatcgacaagtgaaacttttgttcgacttgagccaagcgattttcttcttcgtcttagtgccgcacttagggcatgcgggtaacgtaatttcctggttatcaaaagcgcccataaacatccctcttggttgtgtgagaacaccaagataccaccgcgcctgatgtggttaaaagcaggctaaagcaataacaagtaactccctgttctggcggcccggtgttttcccgtgtatttccggtaaccgccagcctttttcagggcacaacagaaaagggcatcaccgggcgacgggctcataacccaatccacccgggcaaaaagaaagcggtctctgcaagccgccgaccaatgcaggtgcccttctctgttgtgtatggagaaactaactttttagcgtctgtgcagatgcgctgaggaaccgagaatgaataatccgtttttcaaaaatatgttggtgtatcgcattagtcgcgatttcaccatcaaccaggaagagctggaacagcagcttgaactatttcgcttcactccatgcggtagccaggatatggcaaaaaccggttgggtatcaccacttggtcagctgtcagatcgcttgcatcacactgtcaataatcaagtgttgttggttattcgccgggaagaaaaaatactgccatctcctgtcattactgaagaactgcgcaagcgtgtgtcgcgtctagaatccgatcaggggcgtcgcctcaaaaaaactgagaaagattcgctgcgtgatgaagtgttgcactccctgcttcctcgggcgttctccaaaaactcgactgttggtttgtggatcaacgtcaccgacggtctgatcatggttgatgcagccagcgctaaacgtgccgaagactcactggccctgcttcgtaaaactctcggttctctcccggtggtaccgctgactatggaaacgccgatcgaactaactatgaccgactgggttcgttccggtagtgcgcctgctggctttggcctgggtgatgaagccgaactgaaagctattcttgaagatggcggtattggacgctttaaaaaacagactctggtcagtgacgaaattcatgtgcatctggaagctggcaaagtagttacaaagctgtctatcgactggcaacagcgcattcagttcgttctttgcgatgacggcagcatcaaacgccttaagttctctaatgagattacagaacaaaacgacgatatcgaccgtgaggatgcggctcagcggttcgacgctgactttgttctgatgaccggcgagcttatctctctcattaacggattaacaacctctctcggcggcgaagccaagcgataaacaccaggcaacaattacccccataagcatgggttgggttgctgcacgctaaattcagcaattcattaatttaatggcgcggtgcagcgcgccaatatggagaaaaccatgagctacattcagacattatccggcaaacattttaattacctcgatatccaacaggacgatatcgtgatcgaggatattgctaccgcgttgtctcatatctgccgctttgcagggcatcttcctgagttttacagtgtcggccagcatagcgttttaaccagccacctcgttccgcaggagtttgcattagaagcactgcttcatgatgctgctgaagcctacctgcaggacatcccctccccacttaagcgcctgcttccggattaccaggcaatcgaagctcgtgtggacgcagccattcggcagaagttcggtctaccaactgagcaacacccaaccgtgaaatatgccgacctggtgatgctcgccagcgaacgccgcgattttgagattgacgaaggttccatttggccatgcctcgagggagttgtcccaacggatttattcattatcaacccagttcgtcctggccagtcatacggcatgttcatcaatcgctttaacgagttgatggagcagcgccaatgcgccgcatgaaggtaaaagaactcgtagcggaggcgtttgcctccgttgctgaattgccaccaaagcatgcgccgcttatgcgcgaagtcgccaccagactggacgctacgttcgcagcattaaaagagtctctggtgcaactggaacaggaacgtaaagataaaacgccatgaccgtatttgaatatctccaggctcatccgaataccaccagcggtgaaatcgccaaaggtatgaacaaaaagaccccagcggtcgccggagcattatctcagctctatggcaccggtcggatcgtgaagtctggtgttcgcaagggtattccaacataccgcattaacgatatgccgtttggttgcagtaacagcctaaccatgatgtttaaccagctcttgagcagagccagacaaggagcagcccaatgacagcactcaacaaacaggcgctgcgtgaagaattccagttcatgcaggacaactatagcgacccggcagaccacgatcggcaggtgatttacatcgaggcggaggcgctgctggatgagttggaagccaaagactcaacgatagcagcacaacaacatgagatccgtatgttgctgaatgcgcttgaggaaaaaccatgcccgaaatgcaacgacacaggaatgactgatagtggcggcacgcagccatggggcgagccgattgagattgaatgcgactgccgacagcaggatgccaacaccgcagaacttgtagccgctggcattggcgtgaagggggagtgagatggataaattaatcaaacctaccgccaaaggtaaatatgacggttcatgtgattatctttgctcggaagatgcgcgattcatcgttatgcgcggcgattatacggaagcggaaataattcaggcttctgtgtctcaagatgtaatcgactcggatggtgcggctgattttgcaagtagcgcccgctattatcagtgctggtacaaagttagcccaataggtggtcaggatggctattcaggctggcatcatcctcgtgattcgccgtgtcgcggtgcatatttcgcatcagttttgcaatgggattaaggaggactaacccatgacaactaacaaccacccggcgcacggtcctgtatcactcgatcgcctgcaccagatacgcgaacacctgctgcatgatacccaatactcaaacggcgggaacagagcctacattctcgctgatgtattgaaggtgattgatggggctattgcccgcgagctggtacgccgtgagcatgcagcgtggtcacaggctactttcggcgatgtcggtccagttggtccgctgaagcacctttccaaagaagcgctcgaggctgctgctgaaccaggcgaccttagcgaatgggctgacatgcaattcctgttatgggatgcgcaacgtcgtgccggtatcagtgatgagcagattacccaggcaatgataaaaaagctggctataaataaggttcgccaatggcctgagccgaaagacggggaacctcgattgcatatcaaagaacagtcagagcaggagaaaaaataagaatgtttagcctgattcggcgcggtcaaatctacacggacagtagcaactggcccgtaattatccatagctgtagtgatcactcggtccgaattaaacgcaatgatggcgagctgagaacgattagcatcaaacgctttaacgaagattttgaacgagtggagcatgatgagtatcgcaaaatatgtgccgaaatagagcaggaaacaaacctgaaaaacctacgtgcgatgcgtcgcggcaagattactgaatagccaaacaggagaatatttaacgtgaacaacttaatgatcgaccttgagtccatgggcaaaaaaccgaatgcccctattgtctccattggtgccgtattcttcgatccgcaaagcggtgaactgggtcaggagttttacaccgctgttaatcttgaaagcgctatggagcagggagcggtgccggatggtgacactattctgtggtggttaagacaaagctcagaagcacgatcagcaatctgtgttgatgatgcgatgccgatatcatctgccctatctgaactgagccatttcattaatcggcattctgataaccctaaatatttaaaagtttggggcaatggagctactttcgacaacgttatattgcgcggcgcatatgagcgtgccggccaggtttgcccgtggcaattttggaatgatcacgacgtcagaaccatcgtcacattaggcagatctgtaggtttcgatcctaagcgtgatatgccatttgatggggttgcacataacgcactggctgatgcccgccaccaggcgaaatatgtttcagcgatttggcagaaactaatcccaaccaccagcaacagctaaagttttccccgggtgcagccgggataatggagaaataactatgagcaatattttccagttagctcccaacgattgggtttgtgaaagcgttttgatcgcggttactgggctcaaacccggaaccatcctccgtgccagaaaagaatgctggatgattgggagggagtatatccacgtatcgcctgacggaaatcctaaaccttccagtgagtgcatgtataacagaaaggctgtagatgcctgggtcgcttcaatgaaaagcaagcaaccagggtgatttgatgccatgaaaaaggtaagctcgtatcgctcttgggcgtctggaggtaacaccaatggataaagtcacatatccaacaggcgtcgaaaaccacggtggcacattacgcatctggtttaattttaaaggtaagcgtgtcagggaaagtctcggtgtccctgacaccgctaagaacaggaagatagccggggaactgcggacatcagtatgttttgccatccgcacaggaacctttgattatgcaacccagtttcctgactcccctaacctcaaggcttttggtgtaagtaaaaaagacattacagtgaaagaacttgaagaaaaatggctggatctgaaacggatggaaatctgcgcgaacgcatttaatcgctatgaatctgtcgcaaggaatatggtgccgaggatcggaggtaatcgcctggtgtcagcagtaaccaaagaggaattgctgtatctgaggaaatatttgctaactggttatcagaatccgacgaaaaacaaagccccggcaaaagggcgaagcgttgttactgtgaactattacatgacgacaatggccggaatgtttcagtttgctgcggatcacggttacttagaggtgaacccattcgagggaattaagcctctgaaaaaagccagggcagaaccagatcctctgtctcgtgatgaatttattcgcctgatagatgcatgccggcatcagcagacgaaaaacctgtggtcattagcagtgtacacaggaatgcgtcacggggaactggtctccctggcctgggaagatatcgacctgaaggctggaacaattaccgtcagacgtaattatacgaaacttggtgagttcactctaccgaaaaccgaggcaagcacagatcgagtggtgcatcttatccagcccgcaatcagtatcctgaaaaatcaggctgaaatgacaaggctgggcaggcaatatcacattgaagtgcagttacgtgagtacggccgttcggtgaaccatgagtgtacattcgtctttaatccgcatgtggtcagacgcagtaagcaggtcggatttatctaccgggtcgattcagtaggcgactcatgggaagcggcacttaagcgtgcggggatcagacacagaaaggcgtaccagtcacgacacacctatgcgtgctggtcattatcagctggtgcaaaccctagttttattgccagtcagatggggcatgcgagcgcgcagatggtgttcaatgtttacggtgcatggatggctgacagcagcgcagagcagatcgcaatgctgaatcagaagctggcagattttgccccattgatgccccatagccacgagaacagtacgggaggattattaaaatcagtaagttaacccctaacgcccgtcatgttaactgtgtggagggtaacaccacgctttatgccctgccgaaacccgaggttgtcctgcgctggcgtgagcagaccacagatgacttccgcttctgttttaagtttccggcgaccatttcgcatcaggcagcattacggcattgcgatgatttagtgactgaatttttgacccgcatgtcaccgttggctccgcgcattggacaatactggctgcaactgcctgccacattcggcccacgggagctgcctgcgctttggcattttctcgattctcttcccggtgaatttaattatggggtggaagtccgccatccacagtttttcgccaaaggggaagaggaacaaacgcttaatcgcggtttacatcagcgcggcgttaatcgggtgattttagacagccgcccggttcatgcagcacgtccatacagtgaagctattcgcgacgctcaacgaaaaaaacctaaagttccggtacatgctgtactgacggcgaaaaatccactgatccgttttatcggtagtgatgatatgacgcaaaaccgggaattatttcaggtctggttacaaaaattagcgcagtggcatcagaccactacgccttatctttttttacatacgccagatattgcccaggccccggaactggtacataccctgtgggaagacttacgtaaaacgcttccagagatcggagcagttccggctattccacagcaatcttctcttttctgaatttgccacctatcatagacaggtgccatcggccattttaaagggagtttgtatggtaagcgcgctgtatgccgttttaagtgcgttgttattaatgaagttctcttttgatgtcgttcgcctgcgaatgcagtaccgcgttgcctatggcgacggcggttttagcgaactgcaaagcgctattcgcattcatggtaacgcggtggaatatattcctatcgcgattgtgttgatgctgtttatggaaatgaatggcgcagaaacctggatggtgcatatttgcggcatcgttttgcttgctggtcgtctgatgcattattacggttttcatcaccgtctgttccgctggcgacgttctggcatgagcgccacctggtgtgcgctgttgctgatggtgctggcgaatctttggtatatgccctgggagttggttttctccctgcgttagcgcacaatacgccactttctttttcccggatttttacgttatgtctcaccgcgacacgctattttctgcccctatcgccagactgggcgactggacctttgatgaacgggtagctgaagtcttcccggatatgatccagcgttccgttcccggctattccaatattatttccatgattggtatgttagccgagcgcttcgttcaacctggtacgcaggtttacgatctgggttgttctctgggcgcggcgacgctctcggtgcgtcgcaacattcatcatgataattgcaaaattattgccatcgacaactccccggcgatgattgaacgctgccgtcgtcatattgacgcctataaagcccctacgccagtagacgttattgaaggtgatattcgcgatatcgccattgaaaacgcatcgatggtggtgctgaattttaccctgcaattcctggaaccttccgagcgccaggcgttactggataaaatttatcaagggctgaacccgggcggtgcgctggtgctttcggaaaaattcagtttcgaagatgccaaagttggtgaactgctgttcaacatgcaccacgactttaaacgtgccaacggttacagcgaactggagatcagccagaaacgcagcatgctggaaaacgtgatgctgaccgattccgtggaaacccataaagcacgcctgcataaagccggttttgagcatagcgagctgtggttccagtgctttaactttggttcactggtggcattaaaagcagaggacgctgcatgatcgactttggtaacttttattctctgattgccaaaaatcatctttcacactggctcgaaacgctgcccgcgcagattgctaactggcagcgcgagcagcagcacgggctgtttaagcagtggtccaacgcggtggaatttctgcctgaaattaaaccgtatcgtctggatttattgcatagcgtaaccgccgaaagcgaagagccactgagcgccgggcaaattaagcgcattgaaacgctgatgcgcaacctgatgccgtggcgcaaagggccgttctcactgtatggcgtcaacatcgataccgaatggcgttccgactggaaatgggatcgcgttatgccccatctttctgatttaaccgggcgcaccattcttgatgtcggctgtggcagcggttatcacatgtggcgcatgattggcgcaggggcgcatctggcggtgggtatcgatcccacgcagctattcctctgccagtttgaagcagtgcgtaaactgctgggtaacgatcagcgcgcacatttgttaccgttaggtattgaacaacttccggcactgaaagcctttgataccgtcttttcgatgggcgtgctttatcatcgtcgttcaccgctggagcatctctggcagttaaaagaccaactggtgaatgaaggcgaactggtgctggaaacgctggttattgatggcgacgaaaacacggtgctggtgccgggcgatcgttacgctcaaatgcgtaatgtctatttcattccttccgcgctggcgctgaaaaactggctgaagaagtgtggttttgttgatattcgcattgcagatgtgagcgttaccaccacagaagagcagcgacgcaccgaatggatggtcaccgagtctctggccgattttctcgacccgcatgatccgggtaaaacggtggaaggttatcctgcgcctaaacgcgcggtgctgattgcgcgcaagccgtaaaggtctggtaatactgccggatgcggcgtgaacgccttatccggcctacaaagtcttgctaattcaatatattgcaggggctatgtaggcctgataagcatagcgcatcaggca

SEQ ID NO: 1286 - DNA, 972 bp, Escherichia coli
ttatttgatgggataaagatctttgcgcttatacggttggatttcgcccggtttgcgagttttcagcaattttaatatccaggtgtattgttctggtcgcggaccaacaaaaatctcgacttcttcattcatccgccgcgcaatcgtatgatcatccgcctctaacagatcatccatcggtgggcgcacctgaatcgtcagacgatgcgtcttgccatcataaatcggaaatagcggtacaacgcgcgcacggcacactttcatcaaacgaccaatcgcgggcaacgtcgctttataggtggcaaagaaatcaacaaattcgctgtgttctgggccatgatcctgatcgggtaaataatatccccagtaaccctgacgtaccgactggatgaatggtttaataccatcatttctcgcatgcagacgaccaccaaagcgacggcgcaccgtgttccagacataatcaaaaaccgggttgccctgattatggaacatcgctgccattttctgcccttgcgaggccatcagcatggcaggaatatcgacggcccaaccgtgcggcaccagaaaaatcactttctcgttattacgtcgtatctcttcgatgatctccagcccttgccagtcaacgcgcggctgaattttctccggcccgcgtattgccaactcagccatcattaccatcgcttgcggcgcggtggcaaacatctcatctacaatcgcttcgcgttcagcttcactacgttctggaaagcagagcgacagattgattaacgcacgacggcgtgagctttttcccagtcgtccggcaaaacgtcccagccgtgccagaatgggatcacggaactttggcggcgttaaagcgatacccgccatcgctgctacgcccagccatgctccccagtagcgcgggtggcgaaaggatttatcaaactcaggaatgtattcgctattattttttttcgtttccat

SEQ ID NO: 1287 - DNA, 1323 bp, Escherichia coli
ttaatcaaaccgtagctgcggcacaatctctttggcctgtgccaggaattcgcgacgatcggagccggtcagcccttcggtacgcggcagttttgccgtcagcgggtttacggcctgctggtttatccatacttcatagtgcagatgcggcccggttgaacgtccggtattaccggaaagcgcgatacggtcgccacgtttcaccttctgtcccggtttcaccaggatcttgcgcaagtgcatataacgcgtggtgtagctgcgaccatgacgaatagccacataataacctgctgcgccactacgtttggcaaccaccacttcaccgtcacccactgaaagcactggcgtaccttgtggcatggcaaaatcaacacctctgtgtggcgcaacgcgaccggtcaccggattagtacgacgcgggttaaagttagatgagatacggaactgtttcgccgtcgggaatcgcaagaatcctttcgccagaccagtaccgttacgatcgtagaatttgccatcttcagcgcggattgcgtaataatctttaccttctgaacgcaaacgtacgcccagcagctggctttgctcacgtttaccatcaagcatttctcgtgacattaacaccgcaaattcatcgccttttttcagtttgcggaaatccatttgccactgcatggctttaatcactgcgctcacttcggcgctggttaaaccggcgtttctggcgctggcaacaaagcttcccccgacggtacctttcagcagattgttgacccactctccttgctgcatttcgctggtcattttaaaaccgttagcggcagtacggtcataggttcgggtttcacgacgagacacttcccaggtgaggcgctgcagttcgccgtccgcggttaatgtccaggagagttgttgaccgattttcaggttacgcaattctttgtcggcagcagccagttgggtgatatcacccatatcaataccatactgattgagaatgctgcttagcgtatcgccagtggaaacaacatattcatgcacgcccgcttcaccggcgattttgtcatccagttcgtcctggggaatggcttcatcttcttgtgcagcttgatcaatcggctcactggcttcaggtaagagcgaacgaatttcgttctgttccagctcaatggttttgacaattggcgtggcatcgcggtgataaacatagggccgccagacagcgacggccagagtaagaacggtgagcgaccccaacataacgcggtgtggtcgcggtaaattattaaacgccagggcgacagagcgggctatctgttgcac

SEQ ID NO: 1288 - DNA, 933 bp, Escherichia coli
ttaatctcctttcaggcagctcgcatactggttggctaattgattcaggaattctgaatagcttgttttacccagtttgatattcgtccccaggggatccaacgttcccatacgaacggatgtccctcgtgcgacgctctcaacgaccgctggcctgaactgtggctcagcaaaaacgcaggttgctttttgctcaaccaactgtgttcttatttcatgtaaacgctgcgcgccaggttgaatctcagggttaacggtaaaatgaccaagcggtgtcagtccgaactgtttttcgaaatagccgtaagcatcgtgaaaaacgaaataacctttccccttgagcggcgcgagctcgttaccaacctgcttttcggttgaggctaattgtgcctcaaaatccttcaggttggcgtcaagtttggctcgactttgcggcataagttccactaattttccatggattgcaaccgctgtagcccgcgctatctctggggaaagccaaagatgcatgttgaaatcgccgtgatggtgatcttcgtcacttttttccgcgtggtcgtgatcatcatcatcgccgtgaatacttttcatcagcagcggtttcacattctctagctgcgcaatcgttacctgtttcgcttcaggtaatttacttaccggtttttgcatgaacgcttccatctccgggccaacccaaacgactaagtccgcgttctgtaagcgttttacatctgatggacgcagtgaataatcatgttctgaagccccgtcaggtagtaaaacctccgtttctgttaccccatcagcaatggcagaagcgatgaacccaacgggtttaagcgaagcgacaacggcagcatctgcggcctgtgttgcaccgccccagagagcggcggataatgctgcgaaaagaagcgtttttttatgtaacat

SEQ ID NO: 1289 - DNA, 756 bp, Escherichia coli
atgacaagtctggtttccctggaaaatgtctcggtttcttttggccaacgccgcgtcctctctgatgtgtcgctggaacttaaacctggaaaaattttgactttacttgggccaaacggcgcaggtaagtcgacactggtacgggtagtgctcgggctggtaacacccgatgaaggggttatcaagcgcaacggaaaactgcgcatcggctatgtaccgcagaagctgtatctcgacaccacgttgccactgaccgtaaaccgttttttacgcttacgccctggcacacataaagaagatattttgcctgcactgaaacgtgtccaggccgggcatctgattaacgcaccgatgcaaaagctctcgggtggcgaaacgcagcgtgtactgttagcgcgagcattgttaaatcgaccgcaattattagtgctggatgaacccactcagggcgtggatgtgaatggtcaggtggcgttatatgaccttattgaccaactgcgtcgcgaactggattgtggcgttttaatggtatctcacgatctgcatctggtaatggcaaaaaccgatgaagtgctttgcctgaatcaccacatttgttgttccggcacaccggaagttgtttccctgcatccggagtttatttctatgtttggtcctcgtggtgctgaacaactgggtatctatcgccatcatcataatcatcgtcacgatttacagggacgaattgttttgcgtcggggaaatgatcgctcatga

SEQ ID NO: 1290 - DNA, 786 bp, Escherichia coli
atgattgaattattatttcccggttggttagccgggatcatgctcgcctgtgccgcgggtccgctgggttcgtttgtagtctggcgtcgtatgtcttatttcggtgatacgctggctcatgcctcattacttggcgtcgcgtttggtttgttgctggacgtgaatccattctatgcggtgattgccgttacgctgctgctggcgggcggtctggtatggctggagaagcgtccacagctggcgatcgacacgttattagggattatggcgcacagtgccctgtcgctgggcctggtggtcgttagtctgatgtctaatattcgtgttgatttgatggcttacctgttcggtgatttactggcagtgacgccagaagatctcatctctattgcgattggcgtggtcatcgtggtggctattttgttctggcaatggcgcaatttgctgtcgatgacgattagcccggatctggcgtttgttgatggtgtgaaattacagcgcgtgaaattgttgttgatgctggtgacggcattgacgattggtgtagcgatgaaattcgtcggcgcgttgattattacttcactgctgattattcctgctgctactgcacgtcgctttgcccgcacgccggaacagatggctggtgtcgctgttttggtggggatggtggcagtgactggcggtttaaccttttccgcattttacgatacacctgcaggcccgtcggtggtgctatgcgcggcactgttatttattatcagtatgatgaaaaagcaggccagctaa

SEQ ID NO: 1291 - DNA, 1011 bp, Escherichia coli
ttacggcatttctggcggcgtgatgccgaagtggttccacgcccgcactgtcgccatacgcccgcgcggtgtacgctgcaaaaagccttgctgaatcaaataaggttccagtacatcctcaatggtttcacgttcttcgccaatggctgccgccaggttatccagacctaccggcccaccaaagaacttatcgattaccgccagcaacaatttgcggtccatataatcgaaaccttcagcatcgacattcaacatatccagcgcctgagcagcgatatctgccgagatggtgccatcgtgcttcacttcagcgaaatcacgcactcgacgcagcagacggttggcaatacgtggcgtaccgcgcgcacgacgagcaacttccagcgcgccgtcatcactcatctcaagccccataaagcgtgcgctgcgactgacgatatattgcagatccggcacctgataaaactccagacgttgcacaataccaaaacgatcgcgcaacggtgatgtcagcgaacctgcgcgcgtggttgcaccaatcagggtaaacggcggcaaatcaattttaatggagcgtgccgccggaccttcaccaatcatgatatccagttggtaatcttccattgccggatacaacacctcttccaccactggtgaaagacggtggatctcatcaataaacagtacatcgtgtggttcaaggttagtgagcattgctgccagatcgcccgccttttccagcaccggaccagaagtcgtgcgtaaattaacgcccatttcattggcgacaatattggcaagcgtagttttacccaaccccggaggaccaaaaatcaatagatgatcgagggcatcgccgcgcagtttcgctgctttgatgaaaatctccatctgcgaacgaacctgcggctgaccaacatactcttccagtaatttagggcgaatggcgcgatctgccacatcttccggcaaagtggtaccggcagaaatcagacggtctgcttcaatcat

SEQ ID NO: 1292 - DNA, 612 bp, Escherichia coli
tcataacgcggcgcgtagggcttcgcgaattaatgtttcactgctggcgtcagggcgagcgattttgctcaccatgcggcttgcttcttgtggtttatagcccagtgccaccagcgcagcaaccgcttcctgttcagcatcgtcggtcgccgggctggcaggagacgtgagtaccaggtcggcggctggcgtaaagagatcgccatgcaaacctttaaatcggtctttcatttcgacaatcaagcgttcggcggtttttttgccaatacccggcagtttcaccagtgcccccacttcttcacgctcaacggcattaacgaactgctgcgctgacattccggagaggatcgccagcgccaacttcgggccgacgccgttggttttgatcaactctttgaacaacgtgcgctcttgtttattgttaaaaccgtacagcagttgcgcgtcttcacgcaccacaaagtgggtgaaaacgatcgcttcctgacccgcttcagggagttcataaaaacaggtcatcggcatatgcacttcatagcctacgccgcccacttcaattaacaccagcgggggttgtttttcaatgatgatgcctctgagtctgcctatcac

SEQ ID NO: 1293 - DNA, 603 bp, Escherichia coli
gtgaatattaattatcctgctgaatatgaaattggtgatatcgtctttacatgtataagtgctgccttatttggtcaaatatcagctgcatcaaattgctggagtaatcacgtcgggatcattatcggtcataacggtgaagactttctggttgcagaaagccgtgttcccctctcaaccatcactacgctatcccgttttattaaacgctctgctaatcaacgctatgctataaagcgattagacgccggactaacagaacaacaaaatcaacgaattgttgaacaggttccttcccggctacgcaaaatttaccacaccggttttaaatacgaatcttcgcgccagttctgttcaaaatttgtttttgatatttataaagaggcgctatgtattccggtgggtgaaatagagacgtttggagaattgttaaatagcaatccaaatgcaaaactcactttctggaaattctggttcttaggttctattccgtgggagcgtaaaaccgtcacgccagccagtttgtggcatcatccgggtttggtgttgattcacgcggtgggagttgaaacgcctcagcctgaactgaccgaggcggtataa

SEQ ID NO: 1294 - DNA, 522 bp, Escherichia coli
ttaacgcagtcgccctctcgccaggttcagtcgcgattcgctcatttgcatcgcattctgactaacgtggcagtgggtgatggcaatcgccagcgcatcggcggcatccgcctgtggattagcgggcagtttcagcaaggtgcggaccatatgctgcacctggcttttttcggcactaccaatacctaccactgtttgctttacctgacgtgccgcatattcaaataccggcaattcctgattcaccgccgccacaatcgccacgccgcgcgcctgccccagtttcagggctgagtcagcgttcttcgccataaagacctgttcaatggcgaaataatcaggctggaattgggtgatgatttccgtcacgcccgcatagatgagcttcagacgagacggtaaatcatccactttggtgcgtatgcatccgctacccaggtaggacagttgcctgcctacctggcggatgacgccatagccggtcacgcgcgaacccgggtcaatgccgagaataatagccat

SEQ ID NO: 1295 - DNA, 741 bp, Escherichia coli
tcagagagtcgctgcaacctcatcagagatttcaccgttatggtaaacttcctgcacgtcgtcgcaatcttccagcatatcgatcagacgcatcagtttcggtgcggtttctgcatccatatcagctttggtggacgggatcatggaaacttccgcgctgtctgctttcagacctgccgcttccagagcgtcgcgtactttgcccatttcttcccatgcagtgtagacatcaatcgcgccgtcatcataggtcacaacgtcttcagcaccggcttccagggctgcttccatgatggtgtcttcatcgcctttctcgaaggagatcacgccttttttgctgaacaaataagctacggaaccatcagtaccgaggttaccgccacatttgctgaatgcatgacgcacttcagcaacggtacggttgcggttgtcagacagacattcaatcatgattgccgtgccgccaggaccgtaaccttcgtagatgatggtttccatgtttgcatcatcatcaccgcccacacctcgtgcaattgcgcggttcagagtgtcacgggtcatgttgttagacagtgctttatcaattgctgcacgcaaacgcgggttagcgtccggatcaccaccgcccagcttagccgcggttaccagctcacgaatgattttagtgaagattttaccgcgcttagcatcctgcgcagctttacgatgtctggtgttggcccatttactatgacctgccat

SEQ ID NO: 1296 - DNA, 444 bp, Escherichia coli
tcaggcagcgttaattacaaactgttcaatcgcctgccggttgctccaggacttagtgagcgccgccgcagcagacgcatcaagccacttgtaagccagatgttcagtgaaaacgatctggcgctcgtgcggaagcgcaagacagaaccatgattccgtattacgcgtcacgcccggcgcatagcgatgacgtaaatgtgaaaaaatttcaaactctaccgtgcgctgacagtcaattaaggtcagttgttcagcgacaacatcaatggtgacctcttcctttacttcgcgcatggcagcttgcggcgcggtttcaccctcttccacgctgccggttaccgactgccagaaatcgggatcgtcacgccgctgcaacatcagcacccgtttcgtatcttgtgcgtagatgaccactaagatcgaaacgggacgcttataagccat

SEQ ID NO: 1297 - DNA, 1773 bp, Escherichia coli
tcagttattctcagccttcttcacaacctgaatgctcagctcagccagtgcagtcgggttagcaaagctcggcgcttcagtcatcaaacacgctgccgccgtggttttcgggaaggcgataacgtcacggatattgtcggtgccggtcagcagcatcgtcagacggtcaagaccgaatgccaaacctgcgtgcggcggagtaccgtatttcagggcgtcgagcaggaagccgaatttctcgcgctgttcctcttcgttgatacccagaataccaaacaccgtctgctgcatatcaccattatggatacgcacagaaccaccgcccacttcgtaaccattgatgaccatatcgtaagcgttagccaccgcattttccggtgcagctttcagttctgctgccgtcatgtctttcggtgaggtgaacggatggtgcattgctgtcaggccgccttcaccgtcgtcttcaaacatcgggaagtcgataacccacagcggtgcccatttgctttcgtcggtcagaccaaggtctttacccactttcaggcgcagtgcgcccatcgcgtcggcaacaattttcttgttgtcggcaccgaagaaaatcatatcgccatcttgcgcgccagtacgctccaggatggcttcgatgatttctgcattaaggaacttcgctaccgggctattgataccttccagacctttcgcgcgttcgttaactttgatgtaagccagacctttcgcgccgtagattttaacgaagttaccgtattcgtcgatctgcttacgggtcaacgatgcgccgcccggaacacgcagagcggcaacacggcctttcggatcgttcgccggacctgcaaatactgcaaactcaacagatttcagcagatcggcaacgtcggtcagttccatcgggttacgcagatccggtttatcagaaccataacggcgttctgcttctgcaaaggtcattaccgggaaatcgcccagatccacgcccttcacttccagccacagatgacgcaccagcgcttccatcacttcacgcacttgcggcgcggtcatgaaagaagtttccacatcgatctgagtaaattcaggctgacggtcagcacgcaggtcttcgtcacggaagcatttaacgatctgatagtagcggtcaaagccggacatcatcagtagctgtttgaacaactgcggggattgcggcagcgcgtagaatttacctttgtgcacacgagaaggcaccaggtagtcacgcgcgccttcaggcgtggctttggtcagcatcggagtttcgatgtcgaggaagccgtggtcatccataaaacggcgcaccaggctggtgattttagcgcgggttttcaggcgctgagccatttccgggcgacgcaggtcgaggtagcggtatttcagacgcgcttcttcggtgttgacgtggttagagtcaagcggcagaacatctgcacggttgatgatagtcagcgaggacgccagtacttcgatttcgccagtcgccatatcgcggttaatatttttttcgtcacgcgcacgtacggtgcccgtgacctgaatgcagaactcattacgcagttcagaggccagctttaacgcgtccgcacgatccggatcgaaaaatacctgcacgataccttcgcggtcgcgcatatcgatgaagatcaggctaccaagatcacgacgacggttgacccaaccacacagagtcacctgctgccccacgtgggacaaacggagctgtccacaatattctgtacgcat

SEQ ID NO: 1298 - DNA, 567 bp, Escherichia coli
atgcttgaacttaatgctaaaaccaccgcgctggtggtgattgatttacaagaaggcatcttgccttttgccggaggtccacatactgccgatgaggtggttaatcgcgccgggaagctggcggcgaaatttcgcgccagcggtcagcccgtgtttctggtgcgcgttggctggtctgccgattacgccgaagcattaaaacagccggttgatgccccctcccccgcaaaagtgttgcccgaaaactggtggcaacatcctgctgcattaggtgcaaccgacagcgatatcgaaatcatcaaacgtcaatggggtgcgttttacggtacggatctggagttgcaattacgccgccggggtatcgatacaatagtgttatgtgggatctcgaccaatatcggtgttgaatccaccgcccgcaatgcctgggaactcggttttaatctggtgattgccgaagatgcctgtagcgccgctagcgccgagcagcacaataacagcattaatcatatctacccgcgcatcgcccgtgtgcgtagcgttgaagagatcctcaacgcgttatga

SEQ ID NO: 1299 - DNA, 390 bp, Escherichia coli
tcacatcaccgggcagtcatcaaactccgcattcctggcatcattaatgatgtacgtgatcactccaaatatagcgggtgcagaactgtaaccatcatcatctgctggcagcgcttcccttctcccgttatccagattaaccaggtgcggctgaggatgagtccgatatcgcttgatcctgaattccccgtcgattgcacatatcagcagtgaaccatcgcaggcagtaagtgacgcatccacaacaagcaacgctccctggattatcccttccctgaaatgtgaacgcgatgcccgcatgaaataagtcgctgcgggctgactgattagctgctgatcgagggagattcgtgtttcaacataatctgccgcaggtgaaggaaatcccat

SEQ ID NO: 1300 - DNA, 243 bp, Escherichia coli
atgttcgtggaactcgtttatgacaaaaggaattttgatggtctgcccggtgcaaaagatatcattctgggcgagttaactaagagagttcaccggatcttccccgatgctgatgttcgggttaaaccgatgatgacactgccggcgatcaacactgacgccagcaagcatgagaaggaacagataagccgtactgttcaggaaatgtttgaagaggctgaattctggttagtgagtgagtaa

SEQ ID NO: 1301 - DNA, 381 bp, Escherichia coli
atgctgtggaggatattcattttcgtaaacgttggtttgggagaagcggcaaaacggaatgtgggaacaggggaaaatcagataccagatatgtctgcatttccatctggcaataactggtttcagttaccaagtggacatatcgttcagatattttccatgaacgttcttggtgcagatgctaatggcacgtcagctaattaccccattgcttttccaacaacgatgattgctgtcagtgctctatggtctgatgggactgtagcaaatgcaccgacatacaagatgatggggaacacgactaacagaacaactttgacgataaaagtatcagccagctcaggtacttacgggacaatgattattgcggtgggacgataa

SEQ ID NO: 1302 - DNA, 444 bp, Escherichia coli
atgaataaatacagttactctccttcagaaaatgccttttatgctgttgcgttaaaaaatacctatgaattgagtggcacatggccagctgatgcattagatattcctgatgacatttctgtaaaatatatggcggaaccgccacaagggaaaatccgagttgcaggggaaaatggttttcccacatgggctgaaatacctccaccatcacatgaggaacttattgaacaggccgaatcagagaggcaattattgattaaccaggccaacgaatacatgaacagtaaacaatggcccggtaaagccgctattggtcgtctgaaaggcgaggaactggcacaatataattcgtggctggattatctggacgcactggaactggtcgatacttccggtacgcccgatattgaatggcctacgcctccggcagttcaggccagatga

SEQ ID NO: 1303 - DNA, 594 bp, Escherichia coli
ctacgcctccggcagttcaggccagatgacatccggcgcggtgctggtatctgttgcagtcaccgcgtcaatgtaatccagcacggcgttaagtcgggttgtttctgcctgagtcagtttccgtccggcctgtaatttcagctgaatcagactaatggaagccattgctgcatcaatcagtgattggcgctgtgcttctgccgcttctactgaggcaccgtgttgtgcctcagtatctgtcacccatttctcaccatcccatttatcatatggcgttaacggtgaaagcgtgacataaccgtttttgatggcaccgatataatccactgtaacagctgcgccattttcgattgagtaaacagtctcattgcgatggtcttcctcatggctccatcccttacctgtaaatactgccactcttcccggaatgttttcgtccgggtcaataccagtggaacaggcgggcatacttacgccagtattaatatattcatcagaccagcccgtatattcagacgttactgcatcataataaaaacaacgcatatcacccggcactgcagccagcccattttcatcaaaaacaggtttcat

SEQ ID NO: 1304 - DNA, 933 bp, Escherichia coli
ttatttagccctcaccagaaagttaaatgcaatatttcgcggtctgacagcaacaaaattcacaccatcacccacagagttactgttgaaattaaatcgtgaaaatcctggctgatttccggcgatgccatcatgaaagttaattgcgtgtccagcacctccgcctatattcccggcaaactgagaaaagtttgtagcttcctgccagcttaataattcgcgaccaccatctgcacctcgcccgtcatcccagacacgaatgaaatcaccgcgggcttcaggtaataccagcgaaggaaacactttcgccagcacaggataatcagtggcagagaatttcgcgccgttgaacttcaaaaacaccatactggaccagctgtcgattacagtatttggcattgcagcggacggccagaagaacggaacgccaatagctggagaaccttctcccaaaccaaggtttgtgcgagcgtctgcggcattcgttgcgccggttccgccgtctgcgacagtaaccgcaccgttgctccctttctgcgcaagtttaccgatgcctgggatggttacggcggtgccgttgatggtaactgtgatgctttggtttgctgaggtggtggcgaacgtctcccacgcgccaatattctcgtcgtactctttgatgagctgtgacatggcctgcgccaggccgtcgactgagatattgtccgacacaaggattccatacttctggccgctcagcgccggggaaactgctggcgtaaccgtcattgacgtggcgctgttcacggatgaaatctgaaacagctgcaccgggttagacatcacgataatcgtctggccagcgcggacctggctggcgggagctgtccagtttgtgccggagccggttgcggtatttccgttaatagagatagttccggtgctataaatcat

SEQ ID NO: 1305 - DNA, 3927 bp, Escherichia coli
ttaacctgtgaatgaaccagatccgtgtgatactatgatagtaggcgaagaaattgacgcacccctgttattttgagcggacactttaatacgcactgttacgtttggacctgttacaaccgcagaatgcatgataagtctctccatgtcttgcacggatgaaccactctcattgccgttaatgtcgattgttcctgcaccattacctttaacgtttgctataacacagacgtgtcttgcgtgcccagaactggatgaatcattataagtcattaccttttctaaatatccgtcactagaccgactcacattcgtccctgtgtgcatatttgcaatgtccccgataaaactttgggcttccacagtccctttgaatttaccgcttgttgcttggatctcaccagtaaagctaccgccactagcatatactacacctctgacggtcacattgttgaattcagcatctccagctttattcaacttccaaccagcagaaccagctgcatagttgttggactggatatagttaccgatttttgcgttctcaatggtgccgtcctggatgaagctggcccggatgaatgtctgcccgttctggatcacgaacggcaaagctacgctatttccggctgccgtggtgacggcgaagcggtcagccaggaagataacctgcgactgcatgccggatggcgtattctccacgccgatacccatccccgcggcgtaatactgcccgttgctggagacaccaaccttgatgttgtacatcgcgctgagttcgccattaacgttggctatagcctgagcgttagtggtgatggcggaggtatgcccgttcacggtcgccgtgatgccgtttatctgcgtggcggtggcctgctgatagtcggagagcgtctgattcaggctgttgatggatgccttgttgccgttgacgtccgtctgcaggctcagcaatgaacgtgctgtggcttccttctcactgacgatcacctcgtcgagacggtccagattcgcgctgttgccggcgaccgatgcagaaagggttttacgcgtggccacctgagcgaggttggcctggattatcgcaattgcagagttcttcaccccgcccgtcatgccgtccatagaaacgctgatgttgtcgattcgctggcccagggcggtatcagccgtcgcaacggtctgctcaagctgactgagtgaagacgaaacattcccgaccgtgctggaaagctcattaacgctggtctgaaccttcccgacgtcctgggcatttttggcgatatctttcgcttgctgctccagttcgtcgttggcctgtttgatatcgttagccatgccagcaattttttcgttgctgtccaccgcgttctcgatcaggtctttgaacgtttccgactctttcatatcctccagaatgtcattagttatttcgctgacatctatcgaggacgtgcccatgatccagtcggtccagtccccggcgttaccgatacggtcaatcaggcgcgcgcggtaccactggcgaacgccggcaggcatggggccatgctgataatctgcagccgggtacggcaccaggaccagcagttcaggattggcgtagtcggcagttgtggcgcgctgaatctctgtataggccgtgtcgcctgagccatccggaaatttccaggtcaggtcgatatgccagaccacatcttcggtcgccaggaagttgagcggagtacccggttttcccgttttaccggagagataagttgtttcaccgtatccccatggtgacgacgtatcctgcgcattcagcgcccgtacgcgcacgtcatagctgcccgaataaatgccctgaaccgagaaaccctgcgcgctggtaaccggaacgtttatccagtccccgttgtccttacgccactgggcaacataccggattgcgccctctaccttatcccatgacacgtccaggcttgctacagtcagcccctgagacacatgatcgctctcagtcaccacgatattcttcggagcagacaggacgcttatcggcgtgacggtgatcgggggagactcgacccgaacgccgtcatcgatgtaacgatatttgtttggatcgtgctgaacggccgtaatagtgaaaccgcctgtactgtcgtcgttagccgcgattgaggtgaccctgaagtactgtattgcgaggttatcactgtctatcgcccaaacagcgcccgccacaggaacctgactgaatgccgtagccaccgtcaccgtttttttatcggcgctcaccgcgctgattgtccgcgtctgggcttttccgtcgggaaggttaaccaccagccggtctttcgccgcgtagtctatttctcgatcgagggtaatttggcggccgttggccgcgcttatacggcccccgttctccttaccagagcggaaaggatcggcgacaccgataatttcagcgggcaaagggatataaccgtccagccccacgccaaacgatacggtcccgtctttggcattggagagcaatacccagcgaccgcgtcggtgcgcttcactttgcgaggtgcagccgattgcggtcagggacgtctgccggacgtcgtaacgttctacaagcgccgaatcgtaaaccccctcaacggtatcgctgtaatggttctgcggatcggaccaggacaccaggcaggagctgtagcgattcttgtatgagccgcccgcataagtaaacagcccatcgataacgtttgagacgttataaacccagtcaacatcgtcctgcgggacgtctgcctggacataaatctgatcgtttccccagaacgttattccacgaaataccgcggcgagatcgttaagtacctgccaggcgtcctcctggctctgaatgaaaacgttgcaggtgaaacgcggttcggtgccaccggccccgtcggaaaccatttcgtcacagtactgggcgattgaatacagcgcccacttatccaccatggacgcatccacgcgcgtgcccatgccgtaaatttcatccagaaccagatcgtaaaagatccaggcagggttattggaccatgccattttgaacccgccggaccatgaaccagaataggttcgggttttcggatcgtaattatccggaaccttaatcagcttgccttttatcttacaggtcactttcggcgcgctgccgttgaattggctgctgtccacttcgacatacaggagcgctgttaaaggataacgaagcttgctgtcgatgacttccgcatacgaaaacaccttgaaggcgttaaccagtttcgaatttgatccgctggcatcagccgtaatacgcctgaccctgacagaccagccggacgtggattttggcagatcgatacggtggtcacgctgatattccgtcgtggtctttccgtcaaacttgccgtttacaaccgttttccaggcgccgccgtccgttgataaatcgatcgcatactcggtgaccgtgcccaccatatcgccattatctttatagagatactggaccggaaggctgagcttgatacggatggcatccagggaaaggtttgtaaactggcgcgtccagggcgcggtggtggtgacagttgtgcccacggccagctcgttgtcgacctggggcatcccggcaatataggtctggtcctgtgtgcccttgcggaactcccatttcacgccgctgaagttgtattccccgctgtcgtttgccagcggcgtatcgttgagaaaaatgttctgagcggtcaggtcgccctgtatttccccctcagaaacggcaatgagcatttttaattttgcgaccgacagcagatcgtcaggctgctcaaccggagtatgtgaactgccacctccccctttggcaccctgcaggatggtttcttgtttaagaagctgcattttttcacccat

SEQ ID NO: 1306 - DNA, 618 bp, Escherichia coli
ctactgctgatcgctcgagtacataccggcgctgactatcgctccccctgcctcagtcagaccgtaggccagggggacaggatgccccatagcgacggtattgaccggcgccccgaaggcgtagttaggcgtgttgtccgtgctggaggatttacccgcgccgaaggatggctggggcgtgagcatctggacaacgccccccagcatcatcgacactccgacccctgtcagaattgacgtggcgctgatagctgttgcactcatcgccgcgccccaggctgccatgctcgcaccagcggtaaagaatgcagcgaccagcgcaacagccccgacaactatctgcaggacgcccgaacttttggccccctcataaacgggcacgatccggtacacgcttccaccgcgggtcatatcaaactcttccagcccgatattgttgccaccgttaaaaaaggcgaaacggatccccttcatatgagcttcagacatatattttttgaatccgggaacctgtgaacacatggccctgagcatctcgcgcaggtcggcaacatcaaactgaacgcgtttaccgaatttttttgccattttaccttcgagaataagcgtcttaaccat

SEQ ID NO: 1307 - DNA, 720 bp, Escherichia coli
ttaaccatgcattctgtccttatgcctgaccacccggaccgttctgtcgcgataatattttccataaggcgttcgcgaagaaaggtgcccgaaaagatgatggagaatgatgttatcacccacatataccgcggcgtgattagtcaccgatgcctgcacactcatcatgatgatatctccgggctgcattgcaccggcggcaatctcaacgaatccctcacgctcccagttgtcgtcgtagagacgctccttgccgctctcccaccattcgtaaggtactgaataattgccgagaacaatgccgtattcgcgcagataaaattcacggataagcgaccagcagtcggcgtaacccagcacccactgccgcccggcataatcccggtcttcacgcggggaaatcgtacaaaaatccccgtccggccaggacatgatcccccactcaatccccgaccagtcgcactggatccggtccagctctgagggcaccagccgaaccacatccggatgggaatgaatgagcatgatgatctcaccgcgcgcgcgggcagcgagctggtcttccggggagagcgtgaatgtctcctcgggtttatcggcaatgttgcggcagggaataaagatttgttgctggcctgactgaacaatcaggccgcaggcttctttggggtattcagcagcgacgtgctgacggatagcatccagcaatttttcacgcat

SEQ ID NO: 1308 - DNA, 738 bp, Escherichia coli
ttatttcccctgcaggtttgcagccggaaaaccgccgaacggcagcggcgcatccgggccgtgacgatcctgacaatcctgccggcggccgccacaaacatctttcgacgggtcatcggtcggtgtaccgtctttggtaaagtatttcgtgccgttgtaatcgcatccggtcccgcttcggtaccagccccgcatacaccaggtgcagacaggcgtaatctgccgtgtcggcagctgcaggctctgaatatcgaaaggagaacacagctcgaaatcaacctgtacccgcgtctctgcggttttagcattgacgtaaaagagctgtaagcgctcatcggccgggctggcacccggattaccgtttttccagttggcggcatcgagatacttcgaaagcgtggtatggattttgaccttagccctgaccatatcgtcatattcaagacacagcgcggtgacatagtttccgacgttcccgacggacagcgtgggcgttggctgggaacctgtactcgataactccatccccttaagttcgtagggatggggatcgtactggtttccctgccagataatggcgggcagattttctgcggcgaaggctgcccacccctcttcctgaatattgtgcgcatgaaaacgcagcacctgatccataccgaattcagtgccgtcgatctcaatcagctgaataacgctgccgggctcaagctgttgtatgtctgccgtaaaactcat

SEQ ID NO: 1309 - DNA, 339 bp, Escherichia coli
tcagggcgcgaacgcctgttcaaaagtgaaggccacagtggcttttttcccggtagggaaagaaacgctgaacgaatcggccttcattctgaacagctttttttcaccccatggagtggtccaccagaacgatttagtaacgtgagacatcaggaaagcgcgcagcgcagccgcctcctgtctggtgcccgtccagtccaggttccacgtttcctgtttgtcgttgatccccatccccgctatctgtttgtagccatccccgaactgggcctgcagcgttcgggctgtttcagtgccctgcgctgtttttcgcgtgcgccaggtaaacgtgtccgtcac

SEQ ID NO: 1310 - DNA, 3138 bp, Escherichia coli
tcactgtgtcctcctcgaataaagcacgccgcccgcggacatttcttttttcagtcgctcggtgattgtctgctgaacaatcgcctgcagctgtttcgccgtccccgtggcgttcgcctgatttatgcttccgtcactcccctgctggctgatgctgactggggcataaacactgatcccgcccatgccagcaccggctgcgttcccgccgccgaccagaccacccgaggcatacccgcgcatcaggcgatagagattagccacgccgatgcggctggttgattctttggtgaagacgaattccccgcggtgaacgataccggctggctcgtacttgccgccgtgcccggtaaaaccgcccacgtcaaaaccctgtggccggtatgacgggaccgcgaatgactgaccggcagaggaggttttcgccccgccgctaacccagcccattgcactctggatggtgtaagccaccagcagctggttgataacggacacaatcattttaaggatcgagctggtgaattccctgaagctcgccttcccggttgtcgtcaggctggtaagctggcccgccaacccgctgaacgtagcctgagaaatctgctgaacggagctgaaaacgtttgtcgctgaatcctgatattcggcccaaccctgtttcgcaccggccagccagtttgcacgcagggcatcttcagcttcgaacgtcgccctttgctcttccagaaccttttgctgcgcctgagggttgtacgaatagctttcgctgagacgctgcagcgtagtttgtcgcccggcttcccgggtggataacccctcagactgagcctgcaggcccgccctggcggctttttgctgctgctcaaacttcacggcctgatcggccagctggttgagcttttgctggctggcaaccttatcgcccaggtcggccagctgccgcttgtactcgagcgtttcttctttgtgcgccagcagggatttttcctgcgccgtaagctgacgacgcccagcggcctcctgcagaacggtgaactgattttcagtttgccagagatcctgacgctgtttacttatgacgtcgttcacgctggtatgctgctcaagcgttttaagctgggcctgaagggtgagaagttcggcctgcgccttttcctcggctttgtccccggcgggcgttgagtagcttttgcctttcggtgtttttggatccttccactgcttttcaatcccggcgcgggccgcggcaatgtccttttcagtccacagcgtggcgacaccgtctttcgcatcctggcggtttttctcaataagctgactgagctttttctctgctgaagcccgcttttctgccgccgtcgcgccggactccaccagctggttaaactgctgctggctgcggattgcctgagcctgctggtccgttcgcattttttcccgcgcggctgccagcccttcctgggcgtattgctgatcggcaagatcgtaagcctgctttttcagctccacctgctggcgcgcgtttctcagcctttccgcatccgctttctgcagaacgttgttaccggcataatccgggtcgaccttaagattgctggacagcgcgcggtactctttctctgctgcctgccactcagcaaaagagtcctggcgcttcatcgcggtgtcaggattacgcccgacgcccagcatcgcatcccacgcaccggaggcggcattcttcacccagttccaggctttttcgagggatccgagattatcctcgaccgcaccggcgcgctgaatgaccgcgtcggaatatgcccgcatggccagctcggcagccttctgagaatcccccagcgcctgagcagaagctatctgttcatactgggtggctgtcagaaaatgaagggaatcgttgagcgtcgcgaccgcgttaaccggatcatccttcaggcgtttaaactgatttatggtttcgtcaacggcctgcccggtagcctgctgcagcctggcggcaacattgctgaccatgctgacgtcattaccgctgaacgcgccgctgccaacgacctgcgccagcacgcctgcagcggcatgctgagtgatgccattacctgccagcgagcgcgccagcgcctgcagctgccctgacgttttccccgcgtagttcccggtcaggatcagctgcctgttaaattcctcagactctttgctgccgtcgtaccaggccttacccaacccgaataccgccgcggcaatccctccgaccatgctggcgatcccaagaccgcgcagtgacagaagctggtctatccaccctgcccggttagccagcgtgatcccggagccgcgcagcgcgccgaagttaccgcgcatgacctcgccgatcagtattcccagttcctgccgggcggcggcactttgcagccccagaccgtgcgtggcgactttggcagcttcgagcttgcggatatagacttcagccgcatcgctggcaccgacctgcgccgccttcatgcgcagtagctcggtaccggagagcttttgctctgcaacctgttgcttcagctggctgaggaatcgcgtgcgcgctgcggccgatttttcctccacgatctgcagttctttttgacgggccgtggtgcgggaaataagggcgagataatcctgctgggttatgttgccctgtgccctcgctgcgcgaaagcgcgcctgcacgttcgcaagcgactgtgtttcaccattgagctggcgtacgccgtcgatctggcggaaaaatgatgccgcaagttcatcctgtcgacgggcaagcgcagcggcctgcccgtcattctcacgcatgcgctgattaagctcggtcacgcggcggtgagtttcatcaacggactttgaaacgttctgccagtctttggtaagcccttccgttgcggccgactggcgggatttcatatctgcggcagccgccgcgccagcgtcacccacggttttaaacgcagccgcctgccgctctgaagcgcgctgcattcgcgtctggactttttcagagtcctcagccatcccggttagctggccctttatgcgggcaacctgctcactaaacgtggcgctgtcgacgtcaaggttgatgaccagatcgctaatctgctgggccat

SEQ ID NO: 1311 - DNA, 273 bp, Escherichia coli
ctaatctgctgggccatatcggatacctcctgttatcccctcagctgcggccatcagcgcatcatcatccggctcgtcatcgctgatgacgataccggaaggagaaagcaggctgaaatgtgcgggggtaagttccgggtcgcggaagaaaagagtggagatggaataaagcagctctgagaaatgcgcatcgagctgagcgtcctgaaaataatgctcccggtagaactggtgccagtcgcccagctcagtggaagtcattccagccagcat

SEQ ID NO: 1312 - DNA, 432 bp, Escherichia coli
tcagctcgctggcaagggcttttccgccgcaacgggttctgcgctttcggcctccgctggggcatccggatcggcagctttgtcatcctcaaccggaacgagcatgccggagagcagctttatttccatttctgctttaccgatcgcctccggcggccagccgctaagcacctgctggtaaagcgtctccacatccgtgccagccggatcgttatgccacaaagacatcgcaatcaaacgcgcaccgcagcgaatatttgagccaatcagcctggccgtcatttcctgatcgctgatgccgtcgctgtcagcgctgacggccttttcctctgcggccataaacgtgatgtactcaatacgctgaagcgccgacagctcgaagatggtcagtgattctttttgccaggtgaacttctcttttttcagaaacat

SEQ ID NO: 1313 - DNA, 744 bp, Escherichia coli
ttacgctgcagttacggtaactttgcagaccgcaacgaaattaccgtcgctggtcataacaataacgtcagcggtgcctgccgccacgccggtgacggtgatcgcattaccgctaacggtgaccgttgcttttgccccgtctgaggttgccacacggaacgaggtatctgaggcactggctgggttaaccgtcacattgagcgttgtggttgcgccgacggccacgcttgccgtggctttatcgagcgtaacgcctgtcacggggatattcggggtcccgctttcttctgccagttccggcttgccggtattggtaattttcgctgtacgggttatgacctcttttgccggaatggctttacccaggctgctgcaccagccgcggaaaacgtcgacggtaccgttcgggtatttgattttgtaatagcgtactgagccatcaataaaccatgcgacaaggtctttttgcccttcttcgcccggcttccaggcgagggtgaacgaggtatcgccagcagattttgccccctgggccgtcgcgttccagtcggcatcctcgtcgtcgaggtaagtgtcgtcatacgattcggcggtcatttcgcccggcgtcagctctttaattttcgccaggcggttccagtcgatatccgagagtgggttagcgaaagcgttgcccgttccggtgtaaagccagagggtggtaccggcacctttcacaggggccagcgggtttggagtaggcat

SEQ ID NO: 1314 - DNA, 402 bp, Escherichia coli
ttaaattgaataggtgattaagtacgtgaaatcgactgaaccccaggtggccatttcatcatcccgctgatagtcataaccctgcggggtgaacgtctcgaccagttcggtcagacctgggatgaaggccattgccggatacactttctcttccatccaggaatcaagcgcgctgtcggggctggaggctttaagaaatacctcgatgtgaacaaccgcctgccacgaatcttcgtcaagcgaatcgccggtgtactccgcgtcagaaaggtatacagccacggcagggagatcctgctcttcaagaaaaacagggcgcccgtcaaaccaggtgaccgtgtcggtgatctcggctttcagtttggccagaatggctgcacgaattgcgctgtgtctgttcat

SEQ ID NO: 1315 - DNA, 573 bp, Escherichia coli
tcatcgcttcaggtggatcctcagttggtttttcagggctgcggaaagttctttgggcatatcgctttcaataaggcgctttgaaatagcggtgaaggccacggtgagcggtgtctcaagaggaactttgaccacatcaatcggataacgggcctgacctacgcgccgcatgacctgccagcgcccgttcgcaagctgttggataaaagcgttacgaaaggtatagggcccgattttaaggacgctgcccgctccgtttctggccccttttttacgcgagagcctgacgcgcgccgtgccgagctttatcgcaggaagattaccgcggttgatttttatcgacgcgaccgggcgatcgtgacgggccttgcgcagacgggaacgctggcggaccagacgaaccggaagcccctttttccggttatcatcaactgttgcttctttcgctacagctttgctcccctggcttatcgttcttctggccaccctgttaagtgcttttgcggttgcctcaggaacgattaaccggctgaggctgttcaggttctgaatagccctttccagtcctttcac

SEQ ID NO: 1316 - DNA, 243 bp, Escherichia coli
tcattcgagatggatgcggggttttccgttgaacatgtcatagcgggtaacgatcaggttcttaccgtcgtagtcgacgctgtcgtttcggcgtggctggtaaagctcagagaaaaccaccagcgaagtacctgttcccgacaatggccccatttcctcgagttgctcggcgggaacaacgtcatagctgctgccattgatgatcgctgtctttcccatcttttttatagtggccgcgtccat

SEQ ID NO: 1317 - DNA, 327 bp, Escherichia coli
ttaggcattgatcttaacttcaacaacggtggtgtttgcccctgcatcttcccaggcgatgcccgcggcaacggcgtccgtttcttcgatcgtgattttgccgtccttcagatacacctgcgccccggcagtaaccgcatctgcggatacttttggcaggaggaaaacaccctcagtaaaaccgtccccggtatcgccagccgggatatcggtaattgccaccgcgataagttttccaacaacaaccgggtcgccgctgtgaacatcggttgcaccactgtttaccagagggatcgttttcccgtcctgcgcatagttcttagccat

SEQ ID NO: 1318 - DNA, 1947 bp, Escherichia coli
ttactgaccagaggatttggtcatgccgcgatagtccagcggcgccacgccagcatcaatacgcactttcgtggcgataccatcagtggtgaagccttcctgctgatcgatgtatggcgtgtcgacgccgttgagataagcgacctcaatggtgtcggtgcccttcgcggcagccagataccaggctttcgcatcagcttcatccagacgtggttcggcaatgacttctgcaaagttctggatagggttaacgatcccggcattgatgtctgcacctttaacactggccgacttgatggtctgatttgccagagtttccagggcgacgggcaccagcatgtaggccggacggatattcagggttcgctccccctccttctgcagacgcatcagcttgcgcgattcgtccaggctggccacagaaattgcacccgagctcaggttcttgtgatcggcatggaacagcgcctttccgtctgagagtttcgggtttttggtcagaatggcgtaaaccagatcgccaatcgttgctttcgccgcgcgccccatcttcatcggtacgtcggtaagctggttcagatcgtcgttgatgatcgcctggcgagttactgagaagatttcaccatacgtggcaagcgcgatggtttcgcctttgtcactggtagtgatgtacttgtactcagccccttcgcgaacctgtcgcagagaagggaacccacccataccgacacgatgcgccgttttgaagtccgacagctggccttttttggtccactgctcgaaggtttcctgcgcctcgtcccagccctgaatcagcgctttgttcgcaacatcaagcagaatgttgccaaagtcagaggtgctgtgggtcagcgccaggccaaccatctgcatcgggttgtagctggccacgccgatacctttttctgtcagggccatacgcgcatactcgcgcagcgtcataccgttataaacgttatcccgctcctgaccttcgaacccggcacgcgccatcagtgcctggcgaataccatccgcgacgaagttaccgttgcccgcatgaatatgcggctgagtggttttattggacggcgtggccgttttaccgagttctgccagcagcaaatctttcgccttatcgacggagcaatcagggtcggccacacactgattctgcagttccatgtgcttattaccgaacatggcaaagagatcgccgatagcgttaacacgggttttctgctcagccaacacctgcgcgcggatcgcattttcatccggtgccgggtctgtttttgcctgcggtgcctgaggctgggtaataaccgggtcacgctgggtagtgttgcgcggcggggtgatcatgttgcgaatgctttttggcattttttcaaattcctcaatacgttttgaatgaatacaggccatagcctgaagggatggtgtcacctggtcggcaaaacccagttcaaggcactcgctgccgttcatccaggtttcgtcctccagcattaccgcaatttcttcggtggattttccggttttctgtgcataagccgggataagaacggattcaaccttgtcgagaagatccgcatagtcgcgcatatcgctcgcgtcaccaccagcaaacccccagggcttatggatcatcatcatcgtgttttcaggcatgatgaccggattgcctaccatcgcaatcaccgaggccatggaggccgccagaccgtcgatatgtacggtaatcgccgcgccgtggtgcttcagcgcgttataaatagcaattccgtcgaagacatcaccaccgggcgagttgatataaaggttgatgtgggtgacgtccccaagtgcccggagatcattgacgaactgtttcgccgttacgccccagtacccgatttcgtcataaataaaaatgtcggcctcactgttattgctggcctgcat

SEQ ID NO: 1319 - DNA, 1500 bp, Escherichia coli
ttactttttgcgctggctttcggacggtggcgcgcccggttctttggcttcggcactggtgcctcctttatcattggcggggtcggtgtcaaacaccaggccctgttcacggttctcgtcaacctcagctttacggcgtgacttaacatcatccgggttgcgaccgctggcacgtatccagtcggattcagtagcagcaccgccgcggatctgcgttttccaggcattcgcttctttaacgggatcaatccacggcataacgggccccgaataaaccgcgttataaagcgagtccatatcaatgcctctcggcagcttgatttctccggcagcaatagccatcttgagccaggctcggtacatgggccgggtcactgaaccgatgaaccagtcctgaagaatcagatagccgtcggttgactcgacaagctcctgccgctgggcactgtacgttccgttgtagtttctggatgtgctggaaaagctgaggcgactgccggcggacacggcacgcagctgtccgttacgaaaagattcgaggttagggttcgggcgatcggatttaatcatcccgatttcttccccggcctgcagttcgtcatagagcataccgggctgaatcatcagctcgcggtcatcgctgcttgaatcagaatcgaagctctgtccgtcgccttttttgatatacatgccgagtgccgcagcaattctggcagcagtaagctccgagtcctcgtattctttcagcgcgctcagacgcatcagaacaccagacaaaagagacgttccgcgggtctggtgcaggcgtcgggtgaatttgagatgcagcatgttctctgcatctatctctttggtatcaaactgacgcccggatactggcaggcttttatagacctgatattttttcgggcgtccccagttatcgacaaaaacgccctgattgagctgggtggcagcatcgctgttcatcggcacaaagtccggctccagcgcttccagccagaacggcacgccagcaaccggctgaagaccatttccggtaccgcgaaccagctgagcaaatacctcaccgtcccggagccacgttcgcagcatcagccgctccagcattgggcgggtaaactgggttgtgacatctggccttacggaccattcgccccactttcggcggatatcagtggccagctttttagcgatcttcccgttactcagcatcggatgcggttcaactatgatgcccttcgcacccaccaccctttcttccagcttgtcgaaaacgccgatcaccagatcgtggttgttatccagccagcgcgcctgctgcctcagcgaaaccgcccccatctggctgagctgatcggctgaacgattttccttctgggctttgtgggtacgcgtttgctttaccgcctcatacgctttaataactgcgcgggcacgcaggcgtgaggctttccagcctggtgaaaacaggccaatcgcatcatctaaaaaactcat

SEQ ID NO: 1320 - DNA, 216 bp, Escherichia coli
tcatccaaacctcgccagcctgtagccgggtcgcccacggcgtttgttattgagcgttgccagtcgtcgctcccattcctgacggccttttctgatttccgacaggttttcgagcgtcatctgctgcccgttgaaagtgattgatttcccctccagaacagacagctcggctgcagcatagcggtcgatcatgttttgaatatctgctggattcac

SEQ ID NO: 1321 - DNA, 2103 bp, Escherichia coli
tcacacccaacctcctgacgaagaccacggattagcctgctcggttacgggcttctcacgttttggttttggtttagatttcggcgcaggcggcggggatggcatttcgccagcttccgtctgcgtgtcctcgatccacgtttcccgccgtgcccactcaggagctgacggccatttgattttttcgtaaccactaaggatggcgagcgcgtcggcataaacgagcaggtcaaatgcttcgtttgcgccccggccgggcttactccatttcccttcattcgagcgttcctcatacgtcagttcgtcatagaaccagctgcccagccaggcggggaaatgcacatagccagggccgggtgaatcacgccacagcgcattattcacccggtctttaagggcatcggtctggagaagataaagaggcacatcaccagtcgcctgtgcgcggcgcgttgatctgcccgtgttgtcgggaaacgttcgctggataagtttgctgcgcctgacgctgtcccctttgaagagatagatacgcttacccagcccctcacggcgacatctgcgccagaacttgtaggcattatccgtcacgccatcttcgccccctgagtccacggccatcgacatcagccgcatgccctttgatgggtcagctgcgagcggccacgttttatcaaagacgtcagtgagtaaaagatcccagtcctccggatagctcgccggatccacctgaatgctttcaccgttgccgtcgcagcgcagcgaatgccggatgttgtaacggtcaactatccagcgctcacccatacttccataacccgtaatctgcacaacaaagcgccggttgcgcccggcctgcacgtccacggtcgcagtgagaaactgcacgccgttcggtaccgaacgttttgggacgtcttcggcacgctgctcgagcaattcacttttacgctgctccatgctggctcgcggcaaatagggcctgccgaaatcggtgttgatcaccgtcttcagggtttcttcgctgcgcgtggattcatattcctgctcggcggtcagaaacttataaataagctgcgcccaggtctggtaagcagctgccggaccttccatccagaaggaggcaatacgggaacgacggccatcaccgctaaccaggcctttcctgtcgatggtttgcccgtcccggagccagacacatttcatgttaagcgcacgcttcatgtccggtgtgatcctgcctttacaggcagggcactgaagaaacgccgcttcgctggcaagcacaggatcgctgctgtcgcggtatccggtcatattgtccatttccggctggaaatattcgccgcaatgcgggcatggccagtaaagacgacggcggtcaccacggttatagagcgataaaattccggtggtcggaggggcttcatggggcgtggagcgccgccattttgtgtctctgatatccctcccgggcgagctctcaaccagcgtcatcccggaggacatgaatgtcgtggttcgtttcgatgccagtgaaaaagcatccccctccccgtcgatatcttccggaaagcggtcataatccgtcagcgccacacttttatagtccgaggacgacatgatattgacggatggccagcccagcttcagatagttaccggcgcggaatgtacggtcgtagacgttgttatcgttacgtcttgggcttagccgggttttaacttcagggctacagcgaaaagtacggtccaggcgttttttggaatgctcgcgcgctttttcctcagatacctgaattacaagcatatctgccggatcgcagacaatgttataaacgatccagccgtcaatcagcccgatggttttacccgttcgcgctgggcccacaaacacaaccgcatcgtattcacgcgatgccagacagttcatcggctcaatcacatagggtgccagatccggatcccacggaactgagtttcccgcccccattggcacgcgcatataagtactgaccgcatcggccaccggcatacgacgcggggctcgtaaaataccggaaacatcgcggcggatgtccctggcggatgcccgctttgccat

SEQ ID NO: 1322 - DNA, 489 bp, Escherichia coli
tcagtcctcctcaggctgctcctcctcttttccagcgtcctgcaccttctccgccatctggtcgcgcagatcatcgataacgctttgcacacgaactaccgcagcaggcgttaaagcacagtcgcgctcgagcacatccgggagggtttcaagtaccatgacgacggctttcgccatcaatgagaattctcgcgccacttcatctgcgggtattaactgccccgtatcctgttcgaacttcagcctctcgttctctgctttccagtgggacagcctgtcagaagggggcatatcgtcgatgttggccgaaacggtagggatcatcagttcggtcagaatgtcggtcaccagatagagctttaacttgctattgctgcctggagcaggttcaacatttttcagtctcgcggcaaccgtctgacggtgtacgccggttatccctgccagctggttgatattgagttttaaagtggcaatttcctggtccat

SEQ ID NO: 1323 - DNA, 729 bp, Escherichia coli
ctatcgacggcactgctgccagataacaccaccggggaaacattccatcatgatggccgtgcggacataggaagccagttcatccatcgctttcttgtctgctgccatttgctttgtgacatccagcgccgcacattcagcagcgtttttcagcgcgttttcgatcaacgtttcaatgttggtatcaacaccaggtttaactttgaacttatcggcactgacggttaccttgttctgcgctggctcatcacgctggataccaaggctgatgttgtagatattggtcaccggctgaggtgtttcgattgccgctgcgtggatagcaccatttgcgatagcggcgtccttgatgaatgacactccattgcgaataagttcgaaggagacggtgtcacgaatgcgctggtccagctcgtcgattgccttttgtgcagcagaggtatcaatctcaacgccaagcgtcatcgaagcgcaatattgctgctcaccaaaacgcgtattgaccaggtgttcaacggcaaatttctgcccttctgatgtcagaaaggtaaagtgattttctttctggtattcagttgctgtgtgtctggtttcagcaaaaccaagctcgcgcaattcggctgtgccagatttagaaggcagatcaccagacagcaacgcgccacggaaaaacagcgcataaagcacttcattagcagcgccagatagcgtaatgattttgttactcat

SEQ ID NO: 1324 - DNA, 231 bp, Escherichia coli
ctatttgtgggtaaagttcgtagtgcgctgatcgtgcaaaatgattttagttgggaacagttcgcaactctgtcccataaaaatcagcatattcccatctatcccatatccagcgcattgaccatcgggatactgaagggagattccatcatctcttagaaagatcaccatctcttttgtttcaatttgcatatagctacctggaggatttatgaatgcaaggattttcat

SEQ ID NO: 1325 - DNA, 597 bp, Escherichia coli
atggactattaccatgagattgattttccatctttattcgcgagagcagtggaaagcgatgacgatgtgggtactacattgcgcattcacctactttgtgagcgcatggtcgaagcatggatatgcgcatgctgtgactgccaagatctctttggaagagataaaaacaaacttttaatcgaatgtaatactaaaatatccatggcgggaaacctgggaatccccccggaacttatgaaatcacttaaaaccatcaactcaatgcgtaatgaccttgcacacaatccatcaatacaaagcattgctgattcaaggatccagagcctgaaggatactctgactgaatactttaaacagcatccaacggaacccagcatggaagaatcaaaactgggtatttttaacgccgagaatcaattaaccgaagaagtttccttagatagtgacagttcaaaaaacagacttaagttaatcttgctgttcagcaagttaatgcaggcgttaatgcaattagttgcagctaatcataatgggcgctgggataaccaatttagccaattcgtttaccatgtgaccatgaacgcaacaaagagataa

SEQ ID NO: 1326 - DNA, 198 bp, Escherichia coli
ctagtcgtcgagttgcaacacaccgtgatccagtgattctgaataggcgataagtccggtataaccggggataatctcaccattatcagcttcaaattcaggaattgtgccggtggtgatggtgtattgaggctggccatcttccttcgcgaaggctgccaggtcttcaatctgcttagctgtaagaactactgtcat

SEQ ID NO: 1327 - DNA, 480 bp, Escherichia coli
ctattggttattcgacagtcgcactgattcgtaaatccgctcacacgtcattcctgcccggtagctttcgtcagatcgtccagcataatatcgagctgcttctgcaaggcttccgagcatgtcggcaagcattgctgcgttggctccggctgttttgcttctgacggaagtggcgagatctgcggtgtgctttgcggcgtccatgtgggtagcgagttttgttgcttcggcgcgcagctgcttaacagtggtagccaggccagcagaagtaacggcagcgctcgctgcttgagcttgagcatctttaacggcctcatcccgggcgattgttcgcccttgttcaatcatacgagctgcggtctgtgcattcgcttcctgtgaagattccgcgctatcccggtcagcccactttattttccagctgcggttcgtccactcactgccagcgagaaacgaacctaccaacgcaacaatcacaat

SEQ ID NO: 1328 - DNA, 549 bp, Escherichia coli
tcactggtctatcccccagcacgtcagtgcgctttcctggtcccgccgttctacctgcccataacatccatccttctggcccttggtcaggcggcaatcgcggccaccgtctttaatccaccagcggatagcttcacaggctcctttcgtatcgccagcattaattcgcttatagaacgtagacgggaaacattttccggggccgatgttatatgggcagaaagaagcgatacccgctttctgtggttcggtcagtggtactttgatatttcggtcaacccacgccagcgccttgtcgcgttcaatggcgtttacctgggcgcatttctcagctgacagcttcatgccctgtactactggcttgccatcaaccattgttgcaccacggcaaatggtccagagtccgccgccgtcgcgatatgctgtcaagctgttaccctctttctcatccagaaactgatcgagaatcacgggtgcggaagccccggcaagaatcaaaccaacgaccgctgcgctcaatttattcttcagctttagagacatagccat

SEQ ID NO: 1329 - DNA, 279 bp, Escherichia coli
ttattcttcagctttagagacatagccattgcgccgatcctcccgttctttccagcggaaataccagttcactgcacaggtgattaccgtgcatgcgataccgacaataattgcccagtcgctcaggcttaaccctgcaattctgtcggccaacatccaggacacctcttttgctgttttagctgtttcggcatatgccttcgctgatacaccgcagccggcaagcgtggttcctgatccatatgaaagtctgctgtaaatggtgctcattctggtcat

SEQ ID NO: 1330 - DNA, 1053 bp, Escherichia coli
ttatgattttttcagtttttccacctcttcggtggtctgtataaacctgtctgcctccagttctacgccgatcgcccgacggccaagttctattgcagctttcacagttgaaccagagcccataaagaaatcggcaacgatatcccccggtctgctgctggcgctaatgatctgtttcagcatgtcggcaggtttttcgcatggatgtttgcctggataaaactgaacaggcttatgtgtccatacgtcggtataaggaacaagagcggaaacagagaagcagcgccgaaggattttgtattcctccagcaattctgaatacttgcggtttaatgactggtaggtagccaccagctggtggtgaggatgttcaagcttttgctgaatatgtttatcgatggcgatccgcgtgaacagttcctgcaattttcgatagtccacttcattcggtagttgccattggcttgcaccaaaccagtgtgacgccatgtttttctttccggttgcctcagctatttctttcgagctgacacccagtgattcacgggcattacggaagtaatcaatcagcggcgtcataatgtgctgctttagctctgtgcttttcctttcgtaaacatcctctttacctgtatacggtccaagatagtgctcagcaaacaaaatccgttccgtagatggaaagtacgcacgcaggctttctttattacatccattccagcggcccgatggttttgcccaaatgatgtgattcaaaacgttgaatcgggcgcgcatcataatctctatatctgaggccagtcggtgaccgcaaaacaggtagatgctgccagcaggtttaagaacgcgagcatactcagccaggcagctatcaagccagcgtaagtagtcctcgtcccccttccattggttgtcccagccgttgggcttcactttgaagtacggaggatccgtaactataagatcaatagagttatccgggagggtggcgacgtaatgcagactatcagcgttgattaactcaacactgtttatttttacagtatttttcat

SEQ ID NO: 1331 - DNA, 192 bp, Escherichia coli
ttactggaggcgtttataacatccgaactggtaatcagataaccccgccatcaccagctgcgtaagtatgagctggcaacgttcgtggctgaggtgggtattctgtgcaatctccccagccgttgctggtttatcgcttaattcattgaaaacagcctttgccgtttctgtcatatcttcctgatttagcat

SEQ ID NO: 1332 - DNA, 900 bp, Escherichia coli
ttagcaaatattccacatcatcgtactaccgttatggttttcgataatttttgcggctgggctagtaccaaaagagtgcatatagcaatgatgaatagtaaggaccagatcctgcaacgtttggtcactctctagctccatgatatttaaaccaatattttgagctttgtccaaatgaatatgtctggcatgtgcatacgttgcttggtggttgtttaactcatcacatatacgcttagccttagcttcagcgtcagcctgacctgcgaacataccagtacaaagccatttctggacaatttcgttcgcccagagaattgctttttcacactcgccaatcaacgttggatttagtttttggaacgtaaattgccaccattgcagtgcagcagggttggcaaaaatttccgcttttgctctctcatactcctcaataattgcatgagatgataacccattaaactgtggatcaattggccccaagttcgactgtttacctaaaacgatctgctcagcacaacaagcaagcattgtgccacaactcattgaaatcataggtacaatcgctcggatattggttccgaactttgaacgaagataatgaccaattgattctagagctgcgatatcgcctccaggagtatggagtaagatatccaatcccagactcgtatctaacccattgatagcagacataagaccatttttatcatcatctgacatctggatcagatgttgaaacccaggcccccctttttgaaggaagcctgagtaataagaaattacatttcggccagtatgtttcgataaatcacgtaagtacttgtggcgaacctcatccgctggtgtacgttgagcgatagtacccatctcacccaatacgtctatccaatttggcat

SEQ ID NO: 1333 - DNA, 207 bp, Escherichia coli
tcagtatgagtacagttggtgagattgctgaccgttctgctcagtagtatttggtgttactgtgctgtatgaatagagcacaccacttctcacattcagatcgttttgctgagcgagaacacgcatagcaaaatgctgtacggattcgcctttttgaaactcttggggttgtatgcccattttttcgtaaaattcagcagcgctcat

SEQ ID NO: 1334 - DNA, 690 bp, Escherichia coli
tcacatttctgccactttgagggcttcttcttcctcatagtattcaagagccatggccaacgcagattcatcaagctgggtaaaagcggcctttaacccagcccagtgccctgaatagacacgcaaccatgtcgaacggtcaacgctaaccatgcgggccaacgctgcaccagcatagtctttataggtttcattatttctggttgcggcaatttcctgccctgccagccataccaggcctatcagtttctttactacgcgctcctgaagggagttatcacccaggcatttctgataagttttccagacgtattcacacatcatcacctggtgcttatagctaaggtcaaaaccgtagcagtaccgcaaccaggcctgctggtatccactaagcgcggacactgccctacgccacggcgcggactcaaattccgcatcttttatcggcggcattggcctgcggcggctgcgtgtttccagcacatacagtggcgcggaaagtgagttaacaaagcgtggccccttctctccttcgagttcgacgagatgaattccacggcgaggggtggcatttttgtctgctggtgggtgttcactgaaagcctcaagctgcccttttgttcccccagacaggtcaggtagcgcgcggcgcaattctattcttacaaaattcaggtcttgttgattcat

SEQ ID NO: 1335 - DNA, 996 bp, Escherichia coli
ttaagctttcgcaattacgccgatcgccagcgcccgatccataaaacgcagtagcagctcaagctgcgtaccatgcttctgctcgaatgccggtacatcggcgtgtaactcgtcgtggcactctctgcacagagggatcacgaagagatcatgggcttttgttgctgtcccccccataccgtgccctacgatatggtgcggatcatctgctggccgtcggcaacactcacagggttgtgttttaacccagcgggtgtacgtctcatttatccagcggcgtcgctttggcctgagcatgaaagattctggagactccggatcaacagagagcgtgaggatcttcttcgccttctcctgcacgaggctggttgcagaagcggaaggcacaatgtcgctttccctcatgaccgagcggatcttatcatccggaaggcgtagccccttgtgcgcaacgctttccggaataacatcagccaggtcgtttctgaccatccaccagcacagttccggaagcgtcaggatatgcgactcgggaaaaccagaatcacgccgaatgacttccagaatccaggataccaggtttcctgccgctatacctgcaagctgttcggtatgctgccccgacaaagtgtgatcgcaatgccagcacaggcgaatacttcctggtgggtgccgcattgttgtgaagttcttgtcgtgccacgatgaatgtggccactggcattcaaaccgattactcaaccattgctcaagggaaggaagcccaccagcacgctgaataacccgatcattctcgaagacctgccgcattaccggatcatcagccagcggctgaatggcggcgggaacagctcctgtactgaatgacgccatttcttctggttcaggctcaagcagaacgcgaccgcgcataaagaggtgcatcagttccgcgccgggacgaaacaacacaatccccatacgatgggcgatctcgggggtaagcagagctctcac

SEQ ID NO: 1336 - DNA, 684 bp, Escherichia coli
tcacgcgacctgccccctggcaatgtgttctgcccacagtccaccaatccagcgcacgcctttcgccgtgaaacgtgcctggctgaatgcatgatttgaggttacggatgtgccggttttcacttcaaaacggcccgcatcaatatgctgatgccgtggggtcatcgttccgccaagacgatacatgatgtcgttctcaaggaggaataaccgcagatcgggctctttggccttaagcagttttgccacctggcggaatgacattgacccactggctgtacagtaccgatcaacaaacgctaccttcggcgccgcggcagccagttcgttagtcaactgctgtttttgttctgcaaggtcagctgcaagacgtagggcttcagagaatgattgaggaatcgtctgctgctgtgcctgctcaagctcctgccagcgatcaaccagacgcgcggtaaactccggcgacagctgcgcgacaacgatataactgtcccgcttccctatcagataaaccgataccgactgattgaggtgatttttaacttcccccattggggggagttcaataacaccgcgctctgccaggcgttcaatggaccgtttaacatggtcatgtcttgattccaccagctcagcaatatcgctgctggacatggttaacgctgttgttgctaactggctcat

SEQ ID NO: 1337 - DNA, 387 bp, Escherichia coli
tcaggcggctgcacccgccggttcatatctgctgattgttatctctacccgacctttcggcacaacgggtccccattccaccagcatgcgcttaatctggctgtcgtcttcccagacacccgcatgcgtcagcgcgtcaaacagggctttgttgtaattatcgatatcccggcggcgcgcatccggcgggtacagagtgatttctaccgctgccagttcagtcgatggcttcgggagacgtcgtaattgctcaatgatcgccacgcaggcagcgctctggtatttacggccagcggcgctaatgaggtgacgaccggccagcggccccttgttaggggcgcgccagtaagtgttcacgctcggaggaaaaggcaggatcagtttcac

SEQ ID NO: 1338 - DNA, 1320 bp, Escherichia coli
tcacgcggcctctccccgcatattgcgaacaagttcagaagcagcagtaatgatttcgctggtggcagtccgctccagccagagttgattgatattggctttcagcttgtgttgcagtgactcatccagcatgtcagcaccatccacctggtcgaatacaattctaacctccagcggccagatacgggactcgggaagcggatccgatactggtttagctttctcacgaatgtgcatgcggatctggcgaatattggaccaactggaaacatccaggcttcccatggctgcaatgaagtcagtgctgttcatgccatattcaccggatgcttcaagggcaacagtgcgaatacgttccgacatatccaggcgcacagcagcgtcatcgaattcaatcgacaacagccactcatccacaccgaacaaaatactctcacgaataagcagcttcgctttgtcgatcgttaaaggtgatacctgagtgaattccggtgcttcgacagaatccgccgcccaggtatgcccaaacttcgattcactgaatgtgtattcttctttatcgccaaacgcagctctaacgcatgcccacgcctcgacaccgctgatagcaaaaatatctttctgggtgagtggcaactctgcttctggcttatcagctgcaggaggtgtggcagttacaggttgagacttgctggcagcaaattgtgccaaagccataaacgcccgcccttttgcctccagttctgtgcggttgatatagctgaaccgctcgccacgccatgacttatcgaatacagctatggcaccggcaaaaaacgcgctggtgggtttctgtttttcgtcagcaggtacaaaccacacaggcagatcgaacccaatgcgcccgcgaatgaatacaatgtgatcggcatcttccggccaccacgtttcactcggcgcggcttttatcaggaatacatagcgaccgcccttctcgcgctgggctgctgcgtagttcatgatgtgcgtcatgccggtgatcgcctgcttctcgtggtactgcgaacggctatacggtgggttgccatagccagcgccacccagttcagccagacgttcagaccagtcctgcgtcagcgcgttatcttcggcggtgtaccatgccgggcatttcgcgttgtcgtcgtcagcaaacaaatccagaactaatggaccaaatagcgcgttgatcccccaaaaaagcagatccggtgtccgccactgatcgccaacctctttcaattcgtgagctggtttgctacgcagtgccgccagcgcctggcaatatttattggtcatcat

SEQ ID NO: 1339 - DNA, 882 bp, Escherichia coli
tcatgaacggaaccccgaattttctggcagtgagtaatcaacactctggaagtttgcgcggctggctgagttagtctcccatttgccgttaacgcgttcaggccggccagcactggaccatttggtcgcgctttgcaggtaaccagggaagttttttggaatgaacagagttgccgggcggaggtattgcgcctgctcgctatcacgccaatcggcatttttgtaatccactaccaagcacaggtcatcaacagtgaattgttcccgaagacgggcgcgaatattctccagcgacgtgctgcatacctggtagcgtgagccagtagtctgattcaggtaagacaaaacctgtctggcctgatcagtaatcacaacctcagggtcgggttgcgccgcaaccggacaagagggttttgaagttacttgtggttcttgttttgattttactgacggatccccaccagattctgacgggtcaaaaccgccttttttgctggatttcgacgcctcaaattttgacgggtcggattttgatgcatcagattttgatgggtcagattttgatgcgtcagattctgacaggtgagaaaaagcagcctctcgcaacttaacgacgttaagctgatatacgttcgatgcgttacggttcccattacggcgctgcttacgggaaagccagccatccttctcaagctgagcaagggccgtccttaccgtactttctccagcaccgatttgacgtgcgatcgtgccaatagacggccagctaacaccctcatcactactgaagtcggccagacgcgccatgatggcaacgctggataacttcatgcctgacgaagcgcatgcatcccatacgtaaccggttaatttagtgctcat

SEQ ID NO: 1340 - DNA, 339 bp, Escherichia coli
ttaattctgtaaatttacgctggaattgttcaagagggctgaagcactcatgatcgtacccttcgcgaaggtatataacgcgctgtgtatctggctcccagcggacaactctgacgggaactccgtagtgatctctgaaccgccggttaacttcagccattcctcgcgccccttctcgttcatctgaacaaatgcttctaccatcaagtctgctggctggtagttgcctccatcagccgcgttatttatgatttccacatagccgaactgggcatctttacccaccagcggcaaacatctgaattgcttagctggtctgaatcggtttacactgttcat

SEQ ID NO: 1341 - DNA, 564 bp, Escherichia coli
tcatgcgttagtttctccactgatacgacacgccaaggcgcccggagctgcacactcgcgggcgtcaccttttctgcctgttgaaacgaatacgtcaatcgcctgatctgaaacaccaaccccataaagcgccataaatcccaggaacccgtgaatctggtggcggagcttcttactgaataattctgaaagcattttgcgctctgatgaatcaattaccccatcagccgctgctgccatcttggcattagccagctcaccagatgctgctgccgctttcatctcaatgctgtacagctcaacgttatccaggctctcagcagttggaacatccaccagccatttcccttttcggttcgcctggtactcggccaagtaacaagaaccagacaggtcctccatccgttccagttctgccaaggtaaagaaccgactgccacacttctggtacaggtggttgtggaactggtcgatagtcatccctaaatcggaagccatacctaagcgaccatgcttgtgtgccttacacatcaggcggattgctgtatttatgctgtctaccat

SEQ ID NO: 1342 - DNA, 258 bp, Escherichia coli
ttaaagttgactattgttgttagcggaaggtatgccgtcatttttgttcggataaatatcaggtcgtaattgatggggagttactacccatccgccccattggcagagttgaataactctttcagaaggtactcggttctttgcaatccagttcgcaacagattgaactgattggaattcaaaccgccttgatacctctgaaatcgacccgatcgccttcacagctttagctgttacattcttgtgttgagatgacat

SEQ ID NO: 1343 - DNA, 711 bp, Escherichia coli
atgccttgtgcgcttaatcttctacttatggtggaaaatgctaaatacaaagactttgccgaaaggctaaacaggtctctccaagagcaatctattggagttaaagaattgtcagagttcagtggtgtctcgtatgagatggcgcggcgctacactcttggtactgcaaagccgagagatgagaagatgattcgaattgcagaaagacttgccgtctcaccggcttatcttgattatggtgtgcctgttaatggtggcgacgcgccagccaaaggcacggtcagaatagagcaattggatgttcatgcttcagccggttccggatatataaaccaaccattccctacaatagtgagctcaatagagattccagaagagaggatcttcgagttgtttggtcgtagaagccttgatggcatcgtcatgataaatgttgatggcgatagcatgatgcccacgctttgcccaaaggacctgcttttcatagacagcaaggttgaacaattcagcggcgacggcgtttatgtgttcaattttgaagacagtacgttcgttaaacgtttgcagaaggtaaaagggcgccgactggcagttctttcagacaatgaacattacccgcccttcttcatagaggagcatgaaatgaatgaactatacatattcggcaagctaatcagatgcttacctctaaaaatgatagagtttggctaa

SEQ ID NO: 1344 - DNA, 198 bp, Escherichia coli
ctatttaaagagcttcttcagcttgtcctcaaccttcctgatttcggaagtaagctggctgctgttgacattgatagtagctccacatcgacaagtgaaacttttgttcgacttgagccaagcgattttcttcttcgtcttagtgccgcacttagggcatgcgggtaacgtaatttcctggttatcaaaagcgcccat

SEQ ID NO: 1345 - DNA, 918 bp, Escherichia coli
atgaataatccgtttttcaaaaatatgttggtgtatcgcattagtcgcgatttcaccatcaaccaggaagagctggaacagcagcttgaactatttcgcttcactccatgcggtagccaggatatggcaaaaaccggttgggtatcaccacttggtcagctgtcagatcgcttgcatcacactgtcaataatcaagtgttgttggttattcgccgggaagaaaaaatactgccatctcctgtcattactgaagaactgcgcaagcgtgtgtcgcgtctagaatccgatcaggggcgtcgcctcaaaaaaactgagaaagattcgctgcgtgatgaagtgttgcactccctgcttcctcgggcgttctccaaaaactcgactgttggtttgtggatcaacgtcaccgacggtctgatcatggttgatgcagccagcgctaaacgtgccgaagactcactggccctgcttcgtaaaactctcggttctctcccggtggtaccgctgactatggaaacgccgatcgaactaactatgaccgactgggttcgttccggtagtgcgcctgctggctttggcctgggtgatgaagccgaactgaaagctattcttgaagatggcggtattggacgctttaaaaaacagactctggtcagtgacgaaattcatgtgcatctggaagctggcaaagtagttacaaagctgtctatcgactggcaacagcgcattcagttcgttctttgcgatgacggcagcatcaaacgccttaagttctctaatgagattacagaacaaaacgacgatatcgaccgtgaggatgcggctcagcggttcgacgctgactttgttctgatgaccggcgagcttatctctctcattaacggattaacaacctctctcggcggcgaagccaagcgataa

SEQ ID NO: 1346 - DNA, 540 bp, Escherichia coli
atgagctacattcagacattatccggcaaacattttaattacctcgatatccaacaggacgatatcgtgatcgaggatattgctaccgcgttgtctcatatctgccgctttgcagggcatcttcctgagttttacagtgtcggccagcatagcgttttaaccagccacctcgttccgcaggagtttgcattagaagcactgcttcatgatgctgctgaagcctacctgcaggacatcccctccccacttaagcgcctgcttccggattaccaggcaatcgaagctcgtgtggacgcagccattcggcagaagttcggtctaccaactgagcaacacccaaccgtgaaatatgccgacctggtgatgctcgccagcgaacgccgcgattttgagattgacgaaggttccatttggccatgcctcgagggagttgtcccaacggatttattcattatcaacccagttcgtcctggccagtcatacggcatgttcatcaatcgctttaacgagttgatggagcagcgccaatgcgccgcatga

SEQ ID NO: 1347 - DNA, 255 bp, Escherichia coli
atgaccgtatttgaatatctccaggctcatccgaataccaccagcggtgaaatcgccaaaggtatgaacaaaaagaccccagcggtcgccggagcattatctcagctctatggcaccggtcggatcgtgaagtctggtgttcgcaagggtattccaacataccgcattaacgatatgccgtttggttgcagtaacagcctaaccatgatgtttaaccagctcttgagcagagccagacaaggagcagcccaatga

SEQ ID NO: 1348 - DNA, 348 bp, Escherichia coli
atgacagcactcaacaaacaggcgctgcgtgaagaattccagttcatgcaggacaactatagcgacccggcagaccacgatcggcaggtgatttacatcgaggcggaggcgctgctggatgagttggaagccaaagactcaacgatagcagcacaacaacatgagatccgtatgttgctgaatgcgcttgaggaaaaaccatgcccgaaatgcaacgacacaggaatgactgatagtggcggcacgcagccatggggcgagccgattgagattgaatgcgactgccgacagcaggatgccaacaccgcagaacttgtagccgctggcattggcgtgaagggggagtga

SEQ ID NO: 1349 - DNA, 309 bp, Escherichia coli
atggataaattaatcaaacctaccgccaaaggtaaatatgacggttcatgtgattatctttgctcggaagatgcgcgattcatcgttatgcgcggcgattatacggaagcggaaataattcaggcttctgtgtctcaagatgtaatcgactcggatggtgcggctgattttgcaagtagcgcccgctattatcagtgctggtacaaagttagcccaataggtggtcaggatggctattcaggctggcatcatcctcgtgattcgccgtgtcgcggtgcatatttcgcatcagttttgcaatgggattaa

SEQ ID NO: 1350 - DNA, 468 bp, Escherichia coli
atgacaactaacaaccacccggcgcacggtcctgtatcactcgatcgcctgcaccagatacgcgaacacctgctgcatgatacccaatactcaaacggcgggaacagagcctacattctcgctgatgtattgaaggtgattgatggggctattgcccgcgagctggtacgccgtgagcatgcagcgtggtcacaggctactttcggcgatgtcggtccagttggtccgctgaagcacctttccaaagaagcgctcgaggctgctgctgaaccaggcgaccttagcgaatgggctgacatgcaattcctgttatgggatgcgcaacgtcgtgccggtatcagtgatgagcagattacccaggcaatgataaaaaagctggctataaataaggttcgccaatggcctgagccgaaagacggggaacctcgattgcatatcaaagaacagtcagagcaggagaaaaaataa

SEQ ID NO: 1351 - DNA, 255 bp, Escherichia coli
atgtttagcctgattcggcgcggtcaaatctacacggacagtagcaactggcccgtaattatccatagctgtagtgatcactcggtccgaattaaacgcaatgatggcgagctgagaacgattagcatcaaacgctttaacgaagattttgaacgagtggagcatgatgagtatcgcaaaatatgtgccgaaatagagcaggaaacaaacctgaaaaacctacgtgcgatgcgtcgcggcaagattactgaatag

SEQ ID NO: 1352 - DNA, 570 bp, Escherichia coli
gtgaacaacttaatgatcgaccttgagtccatgggcaaaaaaccgaatgcccctattgtctccattggtgccgtattcttcgatccgcaaagcggtgaactgggtcaggagttttacaccgctgttaatcttgaaagcgctatggagcagggagcggtgccggatggtgacactattctgtggtggttaagacaaagctcagaagcacgatcagcaatctgtgttgatgatgcgatgccgatatcatctgccctatctgaactgagccatttcattaatcggcattctgataaccctaaatatttaaaagtttggggcaatggagctactttcgacaacgttatattgcgcggcgcatatgagcgtgccggccaggtttgcccgtggcaattttggaatgatcacgacgtcagaaccatcgtcacattaggcagatctgtaggtttcgatcctaagcgtgatatgccatttgatggggttgcacataacgcactggctgatgcccgccaccaggcgaaatatgtttcagcgatttggcagaaactaatcccaaccaccagcaacagctaa

SEQ ID NO: 1353 - DNA, 237 bp, Escherichia coli
atgagcaatattttccagttagctcccaacgattgggtttgtgaaagcgttttgatcgcggttactgggctcaaacccggaaccatcctccgtgccagaaaagaatgctggatgattgggagggagtatatccacgtatcgcctgacggaaatcctaaaccttccagtgagtgcatgtataacagaaaggctgtagatgcctgggtcgcttcaatgaaaagcaagcaaccagggtga

SEQ ID NO: 1354 - DNA, 1314 bp, Escherichia coli
atggataaagtcacatatccaacaggcgtcgaaaaccacggtggcacattacgcatctggtttaattttaaaggtaagcgtgtcagggaaagtctcggtgtccctgacaccgctaagaacaggaagatagccggggaactgcggacatcagtatgttttgccatccgcacaggaacctttgattatgcaacccagtttcctgactcccctaacctcaaggcttttggtgtaagtaaaaaagacattacagtgaaagaacttgaagaaaaatggctggatctgaaacggatggaaatctgcgcgaacgcatttaatcgctatgaatctgtcgcaaggaatatggtgccgaggatcggaggtaatcgcctggtgtcagcagtaaccaaagaggaattgctgtatctgaggaaatatttgctaactggttatcagaatccgacgaaaaacaaagccccggcaaaagggcgaagcgttgttactgtgaactattacatgacgacaatggccggaatgtttcagtttgctgcggatcacggttacttagaggtgaacccattcgagggaattaagcctctgaaaaaagccagggcagaaccagatcctctgtctcgtgatgaatttattcgcctgatagatgcatgccggcatcagcagacgaaaaacctgtggtcattagcagtgtacacaggaatgcgtcacggggaactggtctccctggcctgggaagatatcgacctgaaggctggaacaattaccgtcagacgtaattatacgaaacttggtgagttcactctaccgaaaaccgaggcaagcacagatcgagtggtgcatcttatccagcccgcaatcagtatcctgaaaaatcaggctgaaatgacaaggctgggcaggcaatatcacattgaagtgcagttacgtgagtacggccgttcggtgaaccatgagtgtacattcgtctttaatccgcatgtggtcagacgcagtaagcaggtcggatttatctaccgggtcgattcagtaggcgactcatgggaagcggcacttaagcgtgcggggatcagacacagaaaggcgtaccagtcacgacacacctatgcgtgctggtcattatcagctggtgcaaaccctagttttattgccagtcagatggggcatgcgagcgcgcagatggtgttcaatgtttacggtgcatggatggctgacagcagcgcagagcagatcgcaatgctgaatcagaagctggcagattttgccccattgatgccccatagccacgagaacagtacgggaggattattaaaatcagtaagttaa

SEQ ID NO: 1355 - DNA, 726 bp, Escherichia coli
gtggagggtaacaccacgctttatgccctgccgaaacccgaggttgtcctgcgctggcgtgagcagaccacagatgacttccgcttctgttttaagtttccggcgaccatttcgcatcaggcagcattacggcattgcgatgatttagtgactgaatttttgacccgcatgtcaccgttggctccgcgcattggacaatactggctgcaactgcctgccacattcggcccacgggagctgcctgcgctttggcattttctcgattctcttcccggtgaatttaattatggggtggaagtccgccatccacagtttttcgccaaaggggaagaggaacaaacgcttaatcgcggtttacatcagcgcggcgttaatcgggtgattttagacagccgcccggttcatgcagcacgtccatacagtgaagctattcgcgacgctcaacgaaaaaaacctaaagttccggtacatgctgtactgacggcgaaaaatccactgatccgttttatcggtagtgatgatatgacgcaaaaccgggaattatttcaggtctggttacaaaaattagcgcagtggcatcagaccactacgccttatctttttttacatacgccagatattgcccaggccccggaactggtacataccctgtgggaagacttacgtaaaacgcttccagagatcggagcagttccggctattccacagcaatcttctcttttctga

SEQ ID NO: 1356 - DNA, 396 bp, Escherichia coli
atggtaagcgcgctgtatgccgttttaagtgcgttgttattaatgaagttctcttttgatgtcgttcgcctgcgaatgcagtaccgcgttgcctatggcgacggcggttttagcgaactgcaaagcgctattcgcattcatggtaacgcggtggaatatattcctatcgcgattgtgttgatgctgtttatggaaatgaatggcgcagaaacctggatggtgcatatttgcggcatcgttttgcttgctggtcgtctgatgcattattacggttttcatcaccgtctgttccgctggcgacgttctggcatgagcgccacctggtgtgcgctgttgctgatggtgctggcgaatctttggtatatgccctgggagttggttttctccctgcgttag

SEQ ID NO: 1357 - DNA, 744 bp, Escherichia coli
atgtctcaccgcgacacgctattttctgcccctatcgccagactgggcgactggacctttgatgaacgggtagctgaagtcttcccggatatgatccagcgttccgttcccggctattccaatattatttccatgattggtatgttagccgagcgcttcgttcaacctggtacgcaggtttacgatctgggttgttctctgggcgcggcgacgctctcggtgcgtcgcaacattcatcatgataattgcaaaattattgccatcgacaactccccggcgatgattgaacgctgccgtcgtcatattgacgcctataaagcccctacgccagtagacgttattgaaggtgatattcgcgatatcgccattgaaaacgcatcgatggtggtgctgaattttaccctgcaattcctggaaccttccgagcgccaggcgttactggataaaatttatcaagggctgaacccgggcggtgcgctggtgctttcggaaaaattcagtttcgaagatgccaaagttggtgaactgctgttcaacatgcaccacgactttaaacgtgccaacggttacagcgaactggagatcagccagaaacgcagcatgctggaaaacgtgatgctgaccgattccgtggaaacccataaagcacgcctgcataaagccggttttgagcatagcgagctgtggttccagtgctttaactttggttcactggtggcattaaaagcagaggacgctgcatga

SEQ ID NO: 1358 - DNA, 972 bp, Escherichia coli
atgatcgactttggtaacttttattctctgattgccaaaaatcatctttcacactggctcgaaacgctgcccgcgcagattgctaactggcagcgcgagcagcagcacgggctgtttaagcagtggtccaacgcggtggaatttctgcctgaaattaaaccgtatcgtctggatttattgcatagcgtaaccgccgaaagcgaagagccactgagcgccgggcaaattaagcgcattgaaacgctgatgcgcaacctgatgccgtggcgcaaagggccgttctcactgtatggcgtcaacatcgataccgaatggcgttccgactggaaatgggatcgcgttatgccccatctttctgatttaaccgggcgcaccattcttgatgtcggctgtggcagcggttatcacatgtggcgcatgattggcgcaggggcgcatctggcggtgggtatcgatcccacgcagctattcctctgccagtttgaagcagtgcgtaaactgctgggtaacgatcagcgcgcacatttgttaccgttaggtattgaacaacttccggcactgaaagcctttgataccgtcttttcgatgggcgtgctttatcatcgtcgttcaccgctggagcatctctggcagttaaaagaccaactggtgaatgaaggcgaactggtgctggaaacgctggttattgatggcgacgaaaacacggtgctggtgccgggcgatcgttacgctcaaatgcgtaatgtctatttcattccttccgcgctggcgctgaaaaactggctgaagaagtgtggttttgttgatattcgcattgcagatgtgagcgttaccaccacagaagagcagcgacgcaccgaatggatggtcaccgagtctctggccgattttctcgacccgcatgatccgggtaaaacggtggaaggttatcctgcgcctaaacgcgcggtgctgattgcgcgcaagccgtaa

SEQ ID NO: 1359 - protein, 323 aa, Escherichia coli
METKKNNSEYIPEFDKSFRHPRYWGAWLGVAAMAGIALTPPKFRDPILARLGRFAGRLGKSSRRRALINLSLCFPERSEAEREAIVDEMFATAPQAMVMMAELAIRGPEKIQPRVDWQGLEIIEEIRRNNEKVIFLVPHGWAVDIPAMLMASQGQKMAAMFHNQGNPVFDYVWNTVRRRFGGRLHARNDGIKPFIQSVRQGYWGYYLPDQDHGPEHSEFVDFFATYKATLPAIGRLMKVCRARVVPLFPIYDGKTHRLTIQVRPPMDDLLEADDHTIARRMNEEVEIFVGPRPEQYTWILKLLKTRKPGEIQPYKRKDLYPIK

SEQ ID NO: 1360 - protein, 440 aa, Escherichia coli [sequence omitted]

SEQ ID NO: 1361 - protein, 310 aa, Escherichia coli
MLHKKTLLFAALSAALWGGATQAADAAVVASLKPVGFIASAIADGVTETEVLLPDGASEHDYSLRPSDVKRLQNADLVVWVGPEMEAFMQKPVSKLPEAKQVTIAQLENVKPLLMKSIHGDDDDHDHAEKSDEDHHHGDFNMHLWLSPEIARATAVAIHGKLVELMPQSRAKLDANLKDFEAQLASTEKQVGNELAPLKGKGYFVFHDAYGYFEKQFGLTPLGHFTVNPEIQPGAQRLHEIRTQLVEQKATCVFAEPQFRPAVVESVARGTSVRMGTLDPLGTNIKLGKTSYSEFLNQLANQYASCLKGD

SEQ ID NO: 1362 - protein, 251 aa, Escherichia coli
MTSLVSLENVSVSFGQRRVLSDVSLELKPGKILTLLGPNGAGKSTLVRVVLGLVTPDEGVIKRNGKLRIGYVPQKLYLDTTLPLTVNRFLRLRPGTHKEDILPALKRVQAGHLINAPMQKLSGGETQRVLLARALLNRPQLLVLDEPTQGVDVNGQVALYDLIDQLRRELDCGVLMVSHDLHLVMAKTDEVLCLNHHICCSGTPEVVSLHPEFISMFGPRGAEQLGIYRHHHNHRHDLQGRIVLRRGNDRS

SEQ ID NO: 1363 - protein, 261 aa, Escherichia coli
MIELLFPGWLAGIMLACAAGPLGSFVVWRRMSYFGDTLAHASLLGVAFGLLLDVNPFYAVIAVTLLLAGGLVWLEKRPQLAIDTLLGIMAHSALSLGLVVVSLMSNIRVDLMAYLFGDLLAVTPEDLISIAIGVVIVVAILFWQWRNLLSMTISPDLAFVDGVKLQRVKLLLMLVTALTIGVAMKFVGALIITSLLIIPAATARRFARTPEQMAGVAVLVGMVAVTGGLTFSAFYDTPAGPSVVLCAALLFIISMMKKQAS

SEQ ID NO: 1364 - protein, 336 aa, Escherichia coli
MIEADRLISAGTTLPEDVADRAIRPKLLEEYVGQPQVRSQMEIFIKAAKLRGDALDHLLIFGPPGLGKTTLANIVANEMGVNLRTTSGPVLEKAGDLAAMLTNLEPHDVLFIDEIHRLSPVVEEVLYPAMEDYQLDIMIGEGPAARSIKIDLPPFTLIGATTRAGSLTSPLRDRFGIVQRLEFYQVPDLQYIVSRSARFMGLEMSDDGALEVARRARGTPRIANRLLRRVRDFAEVKHDGTISADIAAQALDMLNVDAEGFDYMDRKLLLAVIDKFFGGPVGLDNLAAAIGEERETIEDVLEPYLIQQGFLQRTPRGRMATVRAWNHFGITPPEMP

SEQ ID NO: 1365 - protein, 203 aa, Escherichia coli
MIGRLRGIIIEKQPPLVLIEVGGVGYEVHMPMTCFYELPEAGQEAIVFTHFVVREDAQLLYGFNNKQERTLFKELIKTNGVGPKLALAILSGMSAQQFVNAVEREEVGALVKLPGIGKKTAERLIVEMKDRFKGLHGDLFTPAADLVLTSPASPATDDAEQEAVAALVALGYKPQEASRMVSKIARPDASSETLIREALRAAL

SEQ ID NO: 1366 - protein, 200 aa, Escherichia coli
MNINYPAEYEIGDIVFTCISAALFGQISAASNCWSNHVGIIIGHNGEDFLVAESRVPLSTITTLSRFIKRSANQRYAIKRLDAGLTEQQNQRIVEQVPSRLRKIYHTGFKYESSRQFCSKFVFDIYKEALCIPVGEIETFGELLNSNPNAKLTFWKFWFLGSIPWERKTVTPASLWHHPGLVLIHAVGVETPQPELTEAV

SEQ ID NO: 1367 - protein, 173 aa, Escherichia coli
MAIILGIDPGSRVTGYGVIRQVGRQLSYLGSGCIRTKVDDLPSRLKLIYAGVTEIITQFQPDYFAIEQVFMAKNADSALKLGQARGVAIVAAVNQELPVFEYAARQVKQTVVGIGSAEKSQVQHMVRTLLKLPANPQADAADALAIAITHCHVSQNAMQMSESRLNLARGRLR

SEQ ID NO: 1368 - protein, 246 aa, Escherichia coli
MAGHSKWANTRHRKAAQDAKRGKIFTKIIRELVTAAKLGGGDPDANPRLRAAIDKALSNNMTRDTLNRAIARGVGGDDDANMETIIYEGYGPGGTAIMIECLSDNRNRTVAEVRHAFSKCGGNLGTDGSVAYLFSKKGVISFEKGDEDTIMEAALEAGAEDVVTYDDGAIDVYTAWEEMGKVRDALEAAGLKADSAEVSMIPSTKADMDAETAPKLMRLIDMLEDCDDVQEVYHNGEISDEVAATL

SEQ ID NO: 1369 - protein, 147 aa, Escherichia coli
MAYKRPVSILVVIYAQDTKRVLMLQRRDDPDFWQSVTGSVEEGETAPQAAMREVKEEVTIDVVAEQLTLIDCQRTVEFEIFSHLRHRYAPGVTRNTESWFCLALPHERQIVFTEHLAYKWLDASAAAALTKSWSNRQAIEQFVINAA

SEQ ID NO: 1370 - protein, 590 aa, Escherichia coli
MRTEYCGQLRLSHVGQQVTLCGWVNRRRDLGSLIFIDMRDREGIVQVFFDPDRADALKLASELRNEFCIQVTGTVRARDEKNINRDMATGEIEVLASSLTIINRADVLPLDSNHVNTEEARLKYRYLDLRRPEMAQRLKTRAKITSLVRRFMDDHGFLDIETPMLTKATPEGARDYLVPSRVHKGKFYALPQSPQLFKQLLMMSGFDRYYQIVKCFRDEDLRADRQPEFTQIDVETSFMTAPQVREVMEALVRHLWLEVKGVDLGDFPVMTFAEAERRYGSDKPDLRNPMELTDVADLLKSVEFAVFAGPANDPKGRVAALRVPGGASLTRKQIDEYGNFVKIYGAKGLAYIKVNERAKGLEGINSPVAKFLNAEIIEAILERTGAQDGDMIFFGADNKKIVADAMGALRLKVGKDLGLTDESKWAPLWVIDFPMFEDDGEGGLTAMHHPFTSPKDMTAAELKAAPENAVANAYDMVINGYEVGGGSVRIHNGDMQQTVFGILGINEEEQREKFGFLLDALKYGTPPHAGLAFGLDRLTMLLTGTDNIRDVIAFPKTTAAACLMTEAPSFANPTALAELSIQVVKKAENN

SEQ ID NO: 1371 - protein, 188 aa, Escherichia coli
MLELNAKTTALVVIDLQEGILPFAGGPHTADEVVNRAGKLAAKFRASGQPVFLVRVGWSADYAEALKQPVDAPSPAKVLPENWWQHPAALGATDSDIEIIKRQWGAFYGTDLELQLRRRGIDTIVLCGISTNIGVESTARNAWELGFNLVIAEDACSAASAEQHNNSINHIYPRIARVRSVEEILNAL

SEQ ID NO: 1372 - protein, 129 aa, Escherichia coli
MGFPSPAADYVETRISLDQQLISQPAATYFMRASRSHFREGIIQGALLVVDASLTACDGSLLICAIDGEFRIKRYRTHPQPHLVNLDNGRREALPADDDGYSSAPAIFGVITYIINDARNAEFDDCPVM

SEQ ID NO: 1373 - protein, 80 aa, Escherichia coli
MFVELVYDKRNFDGLPGAKDIILGELTKRVHRIFPDADVRVKPMMTLPAINTDASKHEKEQISRTVQEMFEEAEFWLVSE

SEQ ID NO: 1374 - protein, 126 aa, Escherichia coli
MLWRIFIFVNVGLGEAAKRNVGTGENQIPDMSAFPSGNNWFQLPSGHIVQIFSMNVLGADANGTSANYPIAFPTTMIAVSALWSDGTVANAPTYKMMGNTTNRTTLTIKVSASSGTYGTMIIAVGR

SEQ ID NO: 1375 - protein, 147 aa, Escherichia coli
MNKYSYSPSENAFYAVALKNTYELSGTWPADALDIPDDISVKYMAEPPQGKIRVAGENGFPTWAEIPPPSHEELIEQAESERQLLINQANEYMNSKQWPGKAAIGRLKGEELAQYNSWLDYLDALELVDTSGTPDIEWPTPPAVQAR

SEQ ID NO: 1376 - protein, 197 aa, Escherichia coli
MKPVFDENGLAAVPGDMRCFYYDAVTSEYTGWSDEYINTGVSMPACSTGIDPDENIPGRVAVFTGKGWSHEEDHRNETVYSIENGAAVTVDYIGAIKNGYVTLSPLTPYDKWDGEKWVTDTEAQHGASVEAAEAQRQSLIDAAMASISLIQLKLQAGRKLTQAETTRLNAVLDYIDAVTATDTSTAPDVIWPELPEA

SEQ ID NO: 1377 - protein, 310 aa, Escherichia coli
MIYSTGTISINGNTATGSGTNWTAPASQVRAGQTIIVMSNPVQLFQISSVNSATSMTVTPAVSPALSGQKYGILVSDNISVDGLAQAMSQLIKEYDENIGAWETFATTSANQSITVTINGTAVTIPGIGKLAQKGSNGAVTVADGGTGATNAADARTNLGLGEGSPAIGVPFFWPSAAMPNTVIDSWSSMVFLKFNGAKFSATDYPVLAKVFPSLVLPEARGDFIRVWDDGRGADGGRELLSWQEATNFSQFAGNIGGGAGHAINFHDGIAGNQPGFSRFNFNSNSVGDGVNFVAVRPRNIAFNFLVRAK

SEQ ID NO: 1378 - protein, 1308 aa, Escherichia coli
MGEKMQLLKQETILQGAKGGGGSSHTPVEQPDDLLSVAKLKMLIAVSEGEIQGDLTAQNIFLNDTPLANDSGEYNFSGVKWEFRKGTQDQTYIAGMPQVDNELAVGTTVTTTAPWTRQFTNLSLDAIRIKLSLPVQYLYKDNGDMVGTVTEYAIDLSTDGGAWKTVVNGKFDGKTTTEYQRDHRIDLPKSTSGWSVRVRRITADASGSNSKLVNAFKVFSYAEVIDSKLRYPLTALLYVEVDSSQFNGSAPKVTCKIKGKLIKVPDNYDPKTRTYSGSWSGGFKMAWSNNPAWIFYDLVLDEIYGMGTRVDASMVDKWALYSIAQYCDEMVSDGAGGTEPRFTCNVFIQSQEDAWQVLNDLAAVFRGITFWGNDQIYVQADVPQDDVDWVYNVSNVIDGLFTYAGGSYKNRYSSCLVSWSDPQNHYSDTVEGVYDSALVERYDVRQTSLTAIGCTSQSEAHRRGRWVLLSNAKDGTVSFGVGLDGYIPLPAEIIGVADPFRSGKENGGRISAANGRQITLDREIDYAAKDRLVVNLPDGKAQTRTISAVSADKKTVTVATAFSQVPVAGAVWAIDSDNLAIQYFRVTSIAANDDSTGGFTITAVQHDPNKYRYIDDGVRVESPPITVTPISVLSAPKNIVVTESDHVSQGLTVASLDVSWDKVEGAIRYVAQWRKDNGDWINVPVTSAQGFSVQGIYSGSYDVRVRALNAQDTSSPWGYGETTYLSGKTGKPGTPLNFLATEDVVWHIDLTWKFPDGSGDTAYTEIQRATTADYANPELLVLVPYPAADYQHGPMPAGVRQWYRARLIDRIGNAGDWTDWIMGTSSIDVSEITNDILEDMKESETFKDLIENAVDSNEKIAGMANDIKQANDELEQQAKDIAKNAQDVGKVQTSVNELSSTVGNVSSSLSQLEQTVATADTALGQRIDNISVSMDGMTGGVKNSAIAIIQANLAQVATRKTLSASVAGNSANLDRLDEVIVSEKEATARSLLSLQTDVNGNKASINSLNQTLSDYQQATATQINGITATVNGHTSAITTNAQAIANVNGELSAMYNIKVGVSSNGQYYAAGMGIGVENTPSGMQSQVIFLADRFAVTTAAGNSVALPFVIQNGQTFIRASFIQDGTIENAKIGNYIQSNNYAAGSAGWKLNKAGDAEFNNVTVRGVVYASGGSFTGEIQATSGKFKGTVEAQSFIGDIANMHTGTNVSRSSDGYLEKVMTYNDSSSSGHARHVCVIANVKGNGAGTIDINGNESGSSVQDMERLIMHSAVVTGPNVTVRIKVSAQNNRGASISSPTIIVSHGSGSFTG

SEQ ID NO: 1379 - protein, 205 aa, Escherichia coli
MVKTLILEGKMAKKFGKRVQFDVADLREMLRAMCSQVPGFKKYMSEAHMKGIRFAFFNGGNNIGLEEFDMTRGGSVYRIVPVYEGAKSSGVLQIVVGAVALVAAFFTAGASMAAWGAAMSATAISATSILTGVGVSMMLGGVVQMLTPQPSFGAGKSSSTDNTPNYAFGAPVNTVAMGHPVPLAYGLTEAGGAIVSAGMYSSDQQ

SEQ ID NO: 1380 - protein, 239 aa, Escherichia coli
MREKLLDAIRQHVAAEYPKEACGLIVQSGQQQIFIPCRNIADKPEETFTLSPEDQLAARARGEIIMLIHSHPDVVRLVPSELDRIQCDWSGIEWGIMSWPDGDFCTISPREDRDYAGRQWVLGYADCWSLIREFYLREYGIVLGNYSVPYEWWESGKERLYDDNWEREGFVEIAAGAMQPGDIIMMSVQASVTNHAAVYVGDNIILHHLFGHLSSRTPYGKYYRDRTVRVVRHKDRMHG

SEQ ID NO: 1381 - protein, 245 aa, Escherichia coli
MSFTADIQQLEPGSVIQLIEIDGTEFGMDQVLRFHAHNIQEEGWAAFAAENLPAIIWQGNQYDPHPYELKGMELSSTGSQPTPTLSVGNVGNYVTALCLEYDDMVRAKVKIHTTLSKYLDAANWKNGNPGASPADERLQLFYVNAKTAETRVQVDFELCSPFDIQSLQLPTRQITPVCTWCMRGWYRSGTGCDYNGTKYFTKDGTPTDDPSKDVCGGRRQDCQDRHGPDAPLPFGGFPAANLQGK

SEQ ID NO: 1382 - protein, 112 aa, Escherichia coli
MTDTFTWRTRKTAQGTETARTLQAQFGDGYKQIAGMGINDKQETWNLDWTGTRQEAAALRAFLMSHVTKSFWWTTPWGEKKLFRMKADSFSVSFPTGKKATVAFTFEQAFAP

SEQ ID NO: 1383 - protein, 1045 aa, Escherichia coli
MAQQISDLVINLDVDSATFSEQVARIKGQLTGMAEDSEKVQTRMQRASERQAAAFKTVGDAGAAAAADMKSRQSAATEGLTKDWQNVSKSVDETHRRVTELNQRMRENDGQAAALARRQDELAASFFRQIDGVRQLNGETQSLANVQARFRAARAQGNITQQDYLALISRTTARQKELQIVEEKSAAARTRFLSQLKQQVAEQKLSGTELLRMKAAQVGASDAAEVYIRKLEAAKVATHGLGLQSAAARQELGILIGEVMRGNFGALRGSGITLANRAGWIDQLLSLRGLGIASMVGGIAAAVFGLGKAWYDGSKESEEFNRQLILTGNYAGKTSGQLQALARSLAGNGITQHAAAGVLAQVVGSGAFSGNDVSMVSNVAARLQQATGQAVDETINQFKRLKDDPVNAVATLNDSLHFLTATQYEQIASAQALGDSQKAAELAMRAYSDAVIQRAGAVEDNLGSLEKAWNWVKNAASGAWDAMLGVGRNPDTAMKRQDSFAEWQAAEKEYRALSSNLKVDPDYAGNNVLQKADAERLRNARQQVELKKQAYDLADQQYAQEGLAAAREKMRTDQQAQAIRSQQQFNQLVESGATAAEKRASAEKKLSQLIEKNRQDAKDGVATLWTEKDIAAARAGIEKQWKDPKTPKGKSYSTPAGDKAEEKAQAELLTLQAQLKTLEQHTSVNDVISKQRQDLWQTENQFTVLQEAAGRRQLTAQEKSLLAHKEETLEYKRQLADLGDKVASQQKLNQLADQAVKFEQQQKAARAGLQAQSEGLSTREAGRQTTLQRLSESYSYNPQAQQKVLEEQRATFEAEDALRANWLAGAKQGWAEYQDSATNVFSSVQQISQATFSGLAGQLTSLTTTGKASFREFTSSILKMIVSVINQLLVAYTIQSAMGWVSGGAKTSSAGQSFAVPSYRPQGFDVGGFTGHGGKYEPAGIVHRGEFVFTKESTSRIGVANLYRLMRGYASGGLVGGGNAAGAGMGGISVYAPVSISQQGSDGSINQANATGTAKQLQAIVQQTITERLKKEMSAGGVLYSRRTQ

SEQ ID NO: 1384 - protein, 90 aa, Escherichia coli
MLAGMTSTELGDWHQFYREHYFQDAQLDAHFSELLYSISTLFFRDPELTPAHFSLLSPSGIVISDDEPDDDALMAAAEGITGGIRYGPAD

SEQ ID NO: 1385 - protein, 143 aa, Escherichia coli
MFLKKEKFTWQKESLTIFELSALQRIEYITFMAAEEKAVSADSDGISDQEMTARLIGSNIRCGARLIAMSLWHNDPAGTDVETLYQQVLSGWPPEAIGKAEMEIKLLSGMLVPVEDDKAADPDAPAEAESAEPVAAEKPLPAS

SEQ ID NO: 1386 - protein, 247 aa, Escherichia coli
MPTPNPLAPVKGAGTTLWLYTGTGNAFANPLSDIDWNRLAKIKELTPGEMTAESYDDTYLDDEDADWNATAQGAKSAGDTSFTLAWKPGEEGQKDLVAWFIDGSVRYYKIKYPNGTVDVFRGWCSSLGKAIPAKEVITRTAKITNTGKPELAEESGTPNIPVTGVTLDKATASVAVGATTTLNVTVNPASASDTSFRVATSDGAKATVTVSGNAITVTGVAAGTADVIVMTSDGNFVAVCKVTVTAA

SEQ ID NO: 1387 - protein, 133 aa, Escherichia coli
MNRHSAIRAAILAKLKAEITDTVTWFDGRPVFLEEQDLPAVAVYLSDAEYTGDSLDEDSWQAVVHIEVFLKASSPDSALDSWMEEKVYPAMAFIPGLTELVETFTPQGYDYQRDDEMATWGSVDFTYLITYSI

SEQ ID NO: 1388 - protein, 190 aa, Escherichia coli
MKGLERAIQNLNSLSRLIVPEATAKALNRVARRTISQGSKAVAKEATVDDNRKKGLPVRLVRQRSRLRKARHDRPVASIKINRGNLPAIKLGTARVRLSRKKGARNGAGSVLKIGPYTFRNAFIQQLANGRWQVMRRVGQARYPIDVVKVPLETPLTVAFTAISKRLIESDMPKELSAALKNQLRIHLKR

SEQ ID NO: 1389 - protein, 80 aa, Escherichia coli
MDAATIKKMGKTAIINGSSYDVVPAEQLEEMGPLSGTGTSLVVFSELYQPRRNDSVDYDGKNLIVTRYDMFNGKPRIHLE

SEQ ID NO: 1390 - protein, 108 aa, Escherichia coli
MAKNYAQDGKTIPLVNSGATDVHSGDPVVVGKLIAVAITDIPAGDTGDGFTEGVFLLPKVSADAVTAGAQVYLKDGKITIEETDAVAAGIAWEDAGANTTVVEVKINA

SEQ ID NO: 1391 - protein, 648 aa, Escherichia coli
MQASNNSEADIFIYDEIGYWGVTAKQFVNDLRALGDVTHINLYINSPGGDVFDGIAIYNALKHHGAAITVHIDGLAASMASVIAMVGNPVIMPENTMMMIHKPWGFAGGDASDMRDYADLLDKVESVLIPAYAQKTGKSTEEIAVMLEDETWMNGSECLELGFADQVTPSLQAMACIHSKRIEEFEKMPKSIRNMITPPRNTTQRDPVITQPQAPQAKTDPAPDENAIRAQVLAEQKTRVNAIGDLFAMFGNKHMELQNQCVADPDCSVDKAKDLLLAELGKTATPSNKTTQPHIHAGNGNFVADGIRQALMARAGFEGQERDNVYNGMTLREYARMALTEKGIGVASYNPMQMVGLALTHSTSDFGNILLDVANKALIQGWDEAQETFEQWTKKGQLSDFKTAHRVGMGGFPSLRQVREGAEYKYITTSDKGETIALATYGEIFSVTRQAIINDDLNQLTDVPMKMGRAAKATIGDLVYAILTKNPKLSDGKALFHADHKNLSSGAISVASLDESRKLMRLQKEGERTLNIRPAYMLVPVALETLANQTIKSASVKGADINAGIVNPIQNFAEVIAEPRLDEADAKAWYLAAAKGTDTIEVAYLNGVDTPYIDQQEGFTTDGIATKVRIDAGVAPLDYRGMTKSSGQ

SEQ ID NO: 1392 - protein, 499 aa, Escherichia coli
MSFLDDAIGLFSPGWKASRLRARAVIKAYEAVKQTRTHKAQKENRSADQLSQMGAVSLRQQARWLDNNHDLVIGVFDKLEERVVGAKGIIVEPHPMLSNGKIAKKLATDIRRKWGEWSVRPDVTTQFTRPMLERLMLRTWLRDGEVFAQLVRGTGNGLQPVAGVPFWLEALEPDFVPMNSDAATQLNQGVFVDNWGRPKKYQVYKSLPVSGRQFDTKEIDAENMLHLKFTRRLHQTRGTSLLSGVLMRLSALKEYEDSELTAARIAAALGMYIKKGDGQSFDSDSSSDDRELMIQPGMLYDELQAGEEIGMIKSDRPNPNLESFRNGQLRAVSAGSRLSFSSTSRNYNGTYSAQRQELVESTDGYLILQDWFIGSVTRPMYRAWLKMAIAAGEIKLPRGIDMDSLYNAVYSGPVMPWIDPVKEANAWKTQIRGGAATESDWIRASGRNPDDVKSRRKAEVDENREQGLVFDTDPANDKGGTSAEAKEPGAPPSESQRKK

SEQ ID NO: 1393 - protein, 71 aa, Escherichia coli
MNPADIQNMIDRYAAAELSVLEGKSITFNGQQMTLENLSEIRKGRQEWERRLATLNNKRRGRPGYRLARFG

SEQ ID NO: 1394 - protein, 700 aa, Escherichia coli
MAKRASARDIRRDVSGILRAPRRMPVADAVSTYMRVPMGAGNSVPWDPDLAPYVIEPMNCLASREYDAVVFVGPARTGKTIGLIDGWIVYNIVCDPADMLVIQVSEEKAREHSKKRLDRTFRCSPEVKTRLSPRRNDNNVYDRTFRAGNYLKLGWPSVNIMSSSDYKSVALTDYDRFPEDIDGEGDAFSLASKRTTTFMSSGMTLVESSPGRDIRDTKWRRSTPHEAPPTTGILSLYNRGDRRRLYWPCPHCGEYFQPEMDNMTGYRDSSDPVLASEAAFLQCPACKGRITPDMKRALNMKCVWLRDGQTIDRKGLVSGDGRRSRIASFWMEGPAAAYQTWAQLIYKFLTAEQEYESTRSEETLKTVINTDFGRPYLPRASMEQRKSELLEQRAEDVPKRSVPNGVQFLTATVDVQAGRNRRFVVQITGYGSMGERWIVDRYNIRHSLRCDGNGESIQVDPASYPEDWDLLLTDVFDKTWPLAADPSKGMRLMSMAVDSGGEDGVTDNAYKFWRRCRREGLGKRIYLFKGDSVRRSKLIQRTFPDNTGRSTRRAQATGDVPLYLLQTDALKDRVNNALWRDSPGPGYVHFPAWLGSWFYDELTYEERSNEGKWSKPGRGANEAFDLLVYADALAILSGYEKIKWPSAPEWARRETWIEDTQTEAGEMPSPPPAPKSKPKPKREKPVTEQANPWSSSGGWV

SEQ ID NO: 1395 - protein, 162 aa, Escherichia coli
MDQEIATLKLNINQLAGITGVHRQTVAARLKNVEPAPGSNSKLKLYLVTDILTELMIPTVSANIDDMPPSDRLSHWKAENERLKFEQDTGQLIPADEVAREFSLMAKAVVMVLETLPDVLERDCALTPAAVVRVQSVIDDLRDQMAEKVQDAGKEEEQPEED

SEQ ID NO: 1396 - protein, 242 aa, Escherichia coli
MSNKIITLSGAANEVLYALFFRGALLSGDLPSKSGTAELRELGFAETRHTATEYQKENHFTFLTSEGQKFAVEHLVNTRFGEQQYCASMTLGVEIDTSAAQKAIDELDQRIRDTVSFELIRNGVSFIKDAAIANGAIHAAAIETPQPVTNIYNISLGIQRDEPAQNKVTVSADKFKVKPGVDTNIETLIENALKNAAECAALDVTKQMAADKKAMDELASYVRTAIMMECFPGGVIWQQCRR

SEQ ID NO: 1397 - protein, 76 aa, Escherichia coli
MKILAFINPPGSYMQIETKEMVIFLRDDGISLQYPDGQCAGYGIDGNMLIFMGQSCELFPTKIILHDQRTTNFTHK

SEQ ID NO: 1398 - protein, 198 aa, Escherichia coli
MDYYHEIDFPSLFARAVESDDDVGTTLRIHLLCERMVEAWICACCDCQDLFGRDKNKLLIECNTKISMAGNLGIPPELMKSLKTINSMRNDLAHNPSIQSIADSRIQSLKDTLTEYFKQHPTEPSMEESKLGIFNAENQLTEEVSLDSDSSKNRLKLILLFSKLMQALMQLVAANHNGRWDNQFSQFVYHVTMNATKR

SEQ ID NO: 1399 - protein, 65 aa, Escherichia coli
MTVVLTAKQIEDLAAFAKEDGQPQYTITTGTIPEFEADNGEIIPGYTGLIAYSESLDHGVLQLDD

SEQ ID NO: 1400 - protein, 159 aa, Escherichia coli
MVIVALVGSFLAGSEWTNRSWKIKWADRDSAESSQEANAQTAARMIEQGRTIARDEAVKDAQAQAASAAVTSAGLATTVKQLRAEATKLATHMDAAKHTADLATSVRSKTAGANAAMLADMLGSLAEAARYYAGRSDESYRAGMTCERIYESVRLSNNQ

SEQ ID NO: 1401 - protein, 182 aa, Escherichia coli
MAMSLKLKNKLSAAVVGLILAGASAPVILDQFLDEKEGNSLTAYRDGGGLWTICRGATMVDGKPVVQGMKLSAEKCAQVNAIERDKALAWVDRNIKVPLTEPQKAGIASFCPYNIGPGKCFPSTFYKRINAGDTKGACEAIRWWIKDGGRDCRLTKGQKDGCYGQVERRDQESALTCWGIDQ

SEQ ID NO: 1402 - protein, 92 aa, Escherichia coli
MTRMSTIYSRLSYGSGTTLAGCGVSAKAYAETAKTAKEVSWMLADRIAGLSLSDWAIIVGIACTVITCAVNWYFRWKEREDRRNGYVSKAEE

SEQ ID NO: 1403 - protein, 350 aa, Escherichia coli
MKNTVKINSVELINADSLHYVATLPDNSIDLIVTDPPYFKVKPNGWDNQWKGDEDYLRWLDSCLAEYARVLKPAGSIYLFCGHRLASDIEIMMRARFNVLNHIIWAKPSGRWNGCNKESLRAYFPSTERILFAEHYLGPYTGKEDVYERKSTELKQHIMTPLIDYFRNARESLGVSSKEIAEATGKKNMASHWFGASQWQLPNEVDYRKLQELFTRIAIDKHIQQKLEHPHHQLVATYQSLNRKYSELLEEYKILRRCFSVSALVPYTDVWTHKPVQFYPGKHPCEKPADMLKQIISASSRPGDIVADFFMGSGSTVKAAIELGRRAIGVELEADRFIQTTEEVEKLKKS

SEQ ID NO: 1404 - protein, 63 aa, Escherichia coli
MLNQEDMTETAKAVFNELSDKPATAGEIAQNTHLSHERCQLILTQLVMAGLSDYQFGCYKRLQ

SEQ ID NO: 1405 - protein, 299 aa, Escherichia coli
MPNWIDVLGEMGTIAQRTPADEVRHKYLRDLSKHTGRNVISYYSGFLQKGGPGFQHLIQMSDDDKNGLMSAINGLDTSLGLDILLHTPGGDIAALESIGHYLRSKFGTNIRAIVPMISMSCGTMLACCAEQIVLGKQSNLGPIDPQFNGLSSHAIIEEYERAKAEIFANPAALQWWQFTFQKLNPTLIGECEKAILWANEIVQKWLCTGMFAGQADAEAKAKRICDELNNHQATYAHARHIHLDKAQNIGLNIMELESDQTLQDLVLTIHHCYMHSFGTSPAAKIIENHNGSTMMWNIC

SEQ ID NO: 1406 - protein, 68 aa, Escherichia coli
MSAAEFYEKMGIQPQEFQKGESVQHFAMRVLAQQNDLNVRSGVLYSYSTVTPNTTEQNGQQSHQLYSY

SEQ ID NO: 1407 - protein, 229 aa, Escherichia coli
MNQQDLNFVRIELRRALPDLSGGTKGQLEAFSEHPPADKNATPRRGIHLVELEGEKGPRFVNSLSAPLYVLETRSRRRPMPPIKDAEFESAPWRRAVSALSGYQQAWLRYCYGFDLSYKHQVMMCEYVWKTYQKCLGDNSLQERVVKKLIGLVWLAGQEIAATRNNETYKDYAGAALARMVSVDRSTWLRVYSGHWAGLKAAFTQLDESALAMALEYYEEEEALKVAEM

SEQ ID NO: 1408 - protein, 331 aa, Escherichia coli
MRALLTPEIAHRMGIVLFRPGAELMHLFMRGRVLLEPEPEEMASFSTGAVPAAIQPLADDPVMRQVFENDRVIQRAGGLPSLEQWLSNRFECQWPHSSWHDKNFTTMRHPPGSIRLCWHCDHTLSGQHTEQLAGIAAGNLVSWILEVIRRDSGFPESHILTLPELCWWMVRNDLADVIPESVAHKGLRLPDDKIRSVMRESDIVPSASATSLVQEKAKKILTLSVDPESPESFMLRPKRRRWINETYTRWVKTQPCECCRRPADDPHHIVGHGMGGTATKAHDLFVIPLCRECHDELHADVPAFEQKHGTQLELLLRFMDRALAIGVIAKA

SEQ ID NO: 1409 - protein, 227 aa, Escherichia coli
MSQLATTALTMSSSDIAELVESRHDHVKRSIERLAERGVIELPPMGEVKNHLNQSVSVYLIGKRDSYIVVAQLSPEFTARLVDRWQELEQAQQQTIPQSFSEALRLAADLAEQKQQLTNELAAAAPKVAFVDRYCTASGSMSFRQVAKLLKAKEPDLRLFLLENDIMYRLGGTMTPRHQHIDAGRFEVKTGTSVTSNHAFSQARFTAKGVRWIGGLWAEHIARGQVA

SEQ ID NO: 1410 - protein, 128 aa, Escherichia coli
MKLILPFPPSVNTYWRAPNKGPLAGRHLISAAGRKYQSAACVAIIEQLRRLPKPSTELAAVEITLYPPDARRRDIDNYNKALFDALTHAGVWEDDSQIKRMLVEWGPVVPKGRVEITISRYEPAGAAA

SEQ ID NO: 1411 - protein, 439 aa, Escherichia coli
MMTNKYCQALAALRSKPAHELKEVGDQWRTPDLLFWGINALFGPLVLDLFADDDNAKCPAWYTAEDNALTQDWSERLAELGGAGYGNPPYSRSQYHEKQAITGMTHIMNYAAAQREKGGRYVFLIKAAPSETWWPEDADHIVFIRGRIGFDLPVWFVPADEKQKPTSAFFAGAIAVFDKSWRGERFSYINRTELEAKGRAFMALAQFAASKSQPVTATPPAADKPEAELPLTQKDIFAISGVEAWACVRAAFGDKEEYTFSESKFGHTWAADSVEAPEFTQVSPLTIDKAKLLIRESILFGVDEWLLSIEFDDAAVRLDMSERIRTVALEASGEYGMNSTDFIAAMGSLDVSSWSNIRQIRMHIREKAKPVSDPLPESRIWPLEVRIVFDQVDGADMLDESLQHKLKANINQLWLERTATSEIITAASELVRNMRGEAA

SEQ ID NO: 1412 - protein, 293 aa, Escherichia coli
MSTKLTGYVWDACASSGMKLSSVAIMARLADFSSDEGVSWPSIGTIARQIGAGESTVRTALAQLEKDGWLSRKQRRNGNRNASNVYQLNVVKLREAAFSHLSESDASKSDPSKSDASKSDPSKFEASKSSKKGGFDPSESGGDPSVKSKQEPQVTSKPSCPVAAQPDPEVVITDQARQVLSYLNQTTGSRYQVCSTSLENIRARLREQFTVDDLCLVVDYKNADWRDSEQAQYLRPATLFIPKNFPGYLQSATKWSSAGRPERVNGKWETNSASRANFQSVDYSLPENSGFRS

SEQ ID NO: 1413 - protein, 112 aa, Escherichia coli
MNSVNRFRPAKQFRCLPLVGKDAQFGYVEIINNAADGGNYQPADLMVEAFVQMNEKGREEWLKLTGGSEITTEFPSELSAGSQIHSALYTFAKGTIMSASALLNNSSVNLQN

SEQ ID NO: 1414 - protein, 187 aa, Escherichia coli
MVDSINTAIRLMCKAHKHGRLGMASDLGMTIDQFHNHLYQKCGSRFFTLAELERMEDLSGSCYLAEYQANRKGKWLVDVPTAESLDNVELYSIEMKAAAASGELANAKMAAAADGVIDSSERKMLSELFSKKLRHQIHGFLGFMALYGVGVSDQAIDVFVSTGRKGDARECAAPGALACRISGETNA

SEQ ID NO: 1415 - protein, 85 aa, Escherichia coli
MSSQHKNVTAKAVKAIGSISEVSRRFEFQSVQSVANWIAKNRVPSERVIQLCQWGGWVVTPHQLRPDIYPNKNDGIPSANNNSQL

SEQ ID NO: 1416 - protein, 236 aa, Escherichia coli
MPCALNLLLMVENAKYKDFAERLNRSLQEQSIGVKELSEFSGVSYEMARRYTLGTAKPRDEKMIRIAERLAVSPAYLDYGVPVNGGDAPAKGTVRIEQLDVHASAGSGYINQPFPTIVSSIEIPEERIFELFGRRSLDGIVMINVDGDSMMPTLCPKDLLFIDSKVEQFSGDGVYVFNFEDSTFVKRLQKVKGRRLAVLSDNEHYPPFFIEEHEMNELYIFGKLIRCLPLKMIEFG

SEQ ID NO: 1417 - protein, 65 aa, Escherichia coli
MGAFDNQEITLPACPKCGTKTKKKIAWLKSNKSFTCRCGATINVNSSQLTSEIRKVEDKLKKLFK

SEQ ID NO: 1418 - protein, 305 aa, Escherichia coli
MNNPFFKNMLVYRISRDFTINQEELEQQLELFRFTPCGSQDMAKTGWVSPLGQLSDRLHHTVNNQVLLVIRREEKILPSPVITEELRKRVSRLESDQGRRLKKTEKDSLRDEVLHSLLPRAFSKNSTVGLWINVTDGLIMVDAASAKRAEDSLALLRKTLGSLPVVPLTMETPIELTMTDWVRSGSAPAGFGLGDEAELKAILEDGGIGRFKKQTLVSDEIHVHLEAGKVVTKLSIDWQQRIQFVLCDDGSIKRLKFSNEITEQNDDIDREDAAQRFDADFVLMTGELISLINGLTTSLGGEAKR

SEQ ID NO: 1419 - protein, 179 aa, Escherichia coli
MSYIQTLSGKHFNYLDIQQDDIVIEDIATALSHICRFAGHLPEFYSVGQHSVLTSHLVPQEFALEALLHDAAEAYLQDIPSPLKRLLPDYQAIEARVDAAIRQKFGLPTEQHPTVKYADLVMLASERRDFEIDEGSIWPCLEGVVPTDLFIINPVRPGQSYGMFINRFNELMEQRQCAA

SEQ ID NO: 1420 - protein, 84 aa, Escherichia coli
MTVFEYLQAHPNTTSGEIAKGMNKKTPAVAGALSQLYGTGRIVKSGVRKGIPTYRINDMPFGCSNSLTMMFNQLLSRARQGAAQ

SEQ ID NO: 1421 - protein, 115 aa, Escherichia coli
MTALNKQALREEFQFMQDNYSDPADHDRQVIYIEAEALLDELEAKDSTIAAQQHEIRMLLNALEEKPCPKCNDTGMTDSGGTQPWGEPIEIECDCRQQDANTAELVAAGIGVKGE

SEQ ID NO: 1422 - protein, 102 aa, Escherichia coli
MDKLIKPTAKGKYDGSCDYLCSEDARFIVMRGDYTEAEIIQASVSQDVIDSDGAADFASSARYYQCWYKVSPIGGQDGYSGWHHPRDSPCRGAYFASVLQWD

SEQ ID NO: 1423 - protein, 155 aa, Escherichia coli
MTTNNHPAHGPVSLDRLHQIREHLLHDTQYSNGGNRAYILADVLKVIDGAIARELVRREHAAWSQATFGDVGPVGPLKHLSKEALEAAAEPGDLSEWADMQFLLWDAQRRAGISDEQITQAMIKKLAINKVRQWPEPKDGEPRLHIKEQSEQEKK

SEQ ID NO: 1424 - protein, 84 aa, Escherichia coli
MFSLIRRGQIYTDSSNWPVIIHSCSDHSVRIKRNDGELRTISIKRFNEDFERVEHDEYRKICAEIEQETNLKNLRAMRRGKITE

SEQ ID NO: 1425 - protein, 189 aa, Escherichia coli
MNNLMIDLESMGKKPNAPIVSIGAVFFDPQSGELGQEFYTAVNLESAMEQGAVPDGDTILWWLRQSSEARSAICVDDAMPISSALSELSHFINRHSDNPKYLKVWGNGATFDNVILRGAYERAGQVCPWQFWNDHDVRTIVTLGRSVGFDPKRDMPFDGVAHNALADARHQAKYVSAIWQKLIPTTSNS

SEQ ID NO: 1426 - protein, 78 aa, Escherichia coli
MSNIFQLAPNDWVCESVLIAVTGLKPGTILRARKECWMIGREYIHVSPDGNPKPSSECMYNRKAVDAWVASMKSKQPG

SEQ ID NO: 1427 - protein, 437 aa, Escherichia coli
MDKVTYPTGVENHGGTLRIWFNFKGKRVRESLGVPDTAKNRKIAGELRTSVCFAIRTGTFDYATQFPDSPNLKAFGVSKKDITVKELEEKWLDLKRMEICANAFNRYESVARNMVPRIGGNRLVSAVTKEELLYLRKYLLTGYQNPTKNKAPAKGRSVVTVNYYMTTMAGMFQFAADHGYLEVNPFEGIKPLKKARAEPDPLSRDEFIRLIDACRHQQTKNLWSLAVYTGMRHGELVSLAWEDIDLKAGTITVRRNYTKLGEFTLPKTEASTDRVVHLIQPAISILKNQAEMTRLGRQYHIEVQLREYGRSVNHECTFVFNPHVVRRSKQVGFIYRVDSVGDSWEAALKRAGIRHRKAYQSRHTYACWSLSAGANPSFIASQMGHASAQMVFNVYGAWMADSSAEQIAMLNQKLADFAPLMPHSHENSTGGLLKSVS

SEQ ID NO: 1428 - protein, 241 aa, Escherichia coli
MEGNTTLYALPKPEVVLRWREQTTDDFRFCFKFPATISHQAALRHCDDLVTEFLTRMSPLAPRIGQYWLQLPATFGPRELPALWHFLDSLPGEFNYGVEVRHPQFFAKGEEEQTLNRGLHQRGVNRVILDSRPVHAARPYSEAIRDAQRKKPKVPVHAVLTAKNPLIRFIGSDDMTQNRELFQVWLQKLAQWHQTTTPYLFLHTPDIAQAPELVHTLWEDLRKTLPEIGAVPAIPQQSSLF

SEQ ID NO: 1429 - protein, 131 aa, Escherichia coli
MVSALYAVLSALLLMKFSFDVVRLRMQYRVAYGDGGFSELQSAIRIHGNAVEYIPIAIVLMLFMEMNGAETWMVHICGIVLLAGRLMHYYGFHHRLFRWRRSGMSATWCALLLMVLANLWYMPWELVFSLR

SEQ ID NO: 1430 - protein, 247 aa, Escherichia coli
MSHRDTLFSAPIARLGDWTFDERVAEVFPDMIQRSVPGYSNIISMIGMLAERFVQPGTQVYDLGCSLGAATLSVRRNIHHDNCKIIAIDNSPAMIERCRRHIDAYKAPTPVDVIEGDIRDIAIENASMVVLNFTLQFLEPSERQALLDKIYQGLNPGGALVLSEKFSFEDAKVGELLFNMHHDFKRANGYSELEISQKRSMLENVMLTDSVETHKARLHKAGFEHSELWFQCFNFGSLVALKAEDAA

SEQ ID NO: 1431 - protein, 323 aa, Escherichia coli
MIDFGNFYSLIAKNHLSHWLETLPAQIANWQREQQHGLFKQWSNAVEFLPEIKPYRLDLLHSVTAESEEPLSAGQIKRIETLMRNLMPWRKGPFSLYGVNIDTEWRSDWKWDRVMPHLSDLTGRTILDVGCGSGYHMWRMIGAGAHLAVGIDPTQLFLCQFEAVRKLLGNDQRAHLLPLGIEQLPALKAFDTVFSMGVLYHRRSPLEHLWQLKDQLVNEGELVLETLVIDGDENTVLVPGDRYAQMRNVYFIPSALALKNWLKKCGFVDIRIADVSVTTTEEQRRTEWMVTESLADFLDPHDPGKTVEGYPAPKRAVLIARKP

SEQ ID NO: 1432 - DNA, 9687 bp, Escherichia coli
aatcgccggtgtactccgcgtcagaaaggtatacagccacggcagggagatcctgctcttcaagaaaaacagggcgcccgtcaaaccaggtgaccgtgtcggtgatctcggctttcagtttggccagaatggctgcacgaattgcgctgtgtctgttcatcgcttcaggtggatcctcagttggtttttcagggctgcggaaagttctttgggcatatcgctttcaataaggcgctttgaaatagcggtgaaggccacggtgagcggtgtctcaagaggaactttgaccacatcaatcggataacgggcctgacctacgcgccgcatgacctgccagcgcccgttcgcaagctgttggataaaagcgttacgaaaggtatagggcccgattttaaggacgctgcccgctccgtttctggccccttttttacgcgagagcctgacgcgcgccgtgccgagctttatcgcaggaagattaccgcggttgatttttatcgacgcgaccgggcgatcgtgacgggccttgcgcagacgggaacgctggcggaccagacgaaccggaagcccctttttccggttatcatcaactgttgcttctttcgctacagctttgctcccctggcttatcgttcttctggccaccctgttaagtgcttttgcggttgcctcaggaacgattaaccggctgaggctgttcaggttctgaatagccctttccagtcctttcacagacatagcgcctcctcattcgagatggatgcggggttttccgttgaacatgtcatagcgggtaacgatcaggttcttaccgtcgtagtcgacgctgtcgtttcggcgtggctggtaaagctcagagaaaaccaccagcgaagtacctgttcccgacaatggccccatttcctcgagttgctcggcgggaacaacgtcatagctgctgccattgatgatcgctgtctttcccatcttttttatagtggccgcgtccatgcgcgccgccatccggtcaaaggagttaggcattgatcttaacttcaacaacggtggtgtttgcccctgcatcttcccaggcgatgcccgcggcaacggcgtccgtttcttcgatcgtgattttgccgtccttcagatacacctgcgccccggcagtaaccgcatctgcggatacttttggcaggaggaaaacaccctcagtaaaaccgtccccggtatcgccagccgggatatcggtaattgccaccgcgataagttttccaacaacaaccgggtcgccgctgtgaacatcggttgcaccactgtttaccagagggatcgttttcccgtcctgcgcatagttcttagccataacttctccattcagcccctttcgaggctggtttcaggtataaaaaaagcccttacgggcgtctgtttgtcaggactgttttttactgaccagaggatttggtcatgccgcgatagtccagcggcgccacgccagcatcaatacgcactttcgtggcgataccatcagtggtgaagccttcctgctgatcgatgtatggcgtgtcgacgccgttgagataagcgacctcaatggtgtcggtgcccttcgcggcagccagataccaggctttcgcatcagcttcatccagacgtggttcggcaatgacttctgcaaagttctggatagggttaacgatcccggcattgatgtctgcacctttaacactggccgacttgatggtctgatttgccagagtttccagggcgacgggcaccagcatgtaggccggacggatattcagggttcgctccccctccttctgcagacgcatcagcttgcgcgattcgtccaggctggccacagaaattgcacccgagctcaggttcttgtgatcggcatggaacagcgcctttccgtctgagagtttcgggtttttggtcagaatggcgtaaaccagatcgccaatcgttgctttcgccgcgcgccccatcttcatcggtacgtcggtaagctggttcagatcgtcgttgatgatcgcctggcgagttactgagaagatttcaccatacgtggcaagcgcgatggtttcgcctttgtcactggtagtgatgtacttgtactcagccccttcgcgaacctgtcgcagagaagggaacccacccataccgacacgatgcgccgttttgaagtccgacagctggccttttttggtccactgctcgaaggtttcctgcgcctcgtcccagccctgaatcagcgctttgttcgcaacatcaagcagaatgttgccaaagtcagaggtgctgtgggtcagcgccaggccaaccatctgcatcgggttgtagctggccacgccgatacctttttctgtcagggccatacgcgcatactcgcgcagcgtcataccgttataaacgttatcccgctcctgaccttcgaacccggcacgcgccatcagtgcctggcgaataccatccgcgacgaagttaccgttgcccgcatgaatatgcggctgagtggttttattggacggcgtggccgttttaccgagttctgccagcagcaaatctttcgccttatcgacggagcaatcagggtcggccacacactgattctgcagttccatgtgcttattaccgaacatggcaaagagatcgccgatagcgttaacacgggttttctgctcagccaacacctgcgcgcggatcgcattttcatccggtgccgggtctgtttttgcctgcggtgcctgaggctgggtaataaccgggtcacgctgggtagtgttgcgcggcggggtgatcatgttgcgaatgctttttggcattttttcaaattcctcaatacgttttgaatgaatacaggccatagcctgaagggatggtgtcacctggtcggcaaaacccagttcaaggcactcgctgccgttcatccaggtttcgtcctccagcattaccgcaatttcttcggtggattttccggttttctgtgcataagccgggataagaacggattcaaccttgtcgagaagatccgcatagtcgcgcatatcgctcgcgtcaccaccagcaaacccccagggcttatggatcatcatcatcgtgttttcaggcatgatgaccggattgcctaccatcgcaatcaccgaggccatggaggccgccagaccgtcgatatgtacggtaatcgccgcgccgtggtgcttcagcgcgttataaatagcaattccgtcgaagacatcaccaccgggcgagttgatataaaggttgatgtgggtgacgtccccaagtgcccggagatcattgacgaactgtttcgccgttacgccccagtacccgatttcgtcataaataaaaatgtcggcctcactgttattgctggcctgcatgcggaaccacgaattactttttgcgctggctttcggacggtggcgcgcccggttctttggcttcggcactggtgcctcctttatcattggcggggtcggtgtcaaacaccaggccctgttcacggttctcgtcaacctcagctttacggcgtgacttaacatcatccgggttgcgaccgctggcacgtatccagtcggattcagtagcagcaccgccgcggatctgcgttttccaggcattcgcttctttaacgggatcaatccacggcataacgggccccgaataaaccgcgttataaagcgagtccatatcaatgcctctcggcagcttgatttctccggcagcaatagccatcttgagccaggctcggtacatgggccgggtcactgaaccgatgaaccagtcctgaagaatcagatagccgtcggttgactcgacaagctcctgccgctgggcactgtacgttccgttgtagtttctggatgtgctggaaaagctgaggcgactgccggcggacacggcacgcagctgtccgttacgaaaagattcgaggttagggttcgggcgatcggatttaatcatcccgatttcttccccggcctgcagttcgtcatagagcataccgggctgaatcatcagctcgcggtcatcgctgcttgaatcagaatcgaagctctgtccgtcgccttttttgatatacatgccgagtgccgcagcaattctggcagcagtaagctccgagtcctcgtattctttcagcgcgctcagacgcatcagaacaccagacaaaagagacgttccgcgggtctggtgcaggcgtcgggtgaatttgagatgcagcatgttctctgcatctatctctttggtatcaaactgacgcccggatactggcaggcttttatagacctgatattttttcgggcgtccccagttatcgacaaaaacgccctgattgagctgggtggcagcatcgctgttcatcggcacaaagtccggctccagcgcttccagccagaacggcacgccagcaaccggctgaagaccatttccggtaccgcgaaccagctgagcaaatacctcaccgtcccggagccacgttcgcagcatcagccgctccagcattgggcgggtaaactgggttgtgacatctggccttacggaccattcgccccactttcggcggatatcagtggccagctttttagcgatcttcccgttactcagcatcggatgcggttcaactatgatgcccttcgcacccaccaccctttcttccagcttgtcgaaaacgccgatcaccagatcgtggttgttatccagccagcgcgcctgctgcctcagcgaaaccgcccccatctggctgagctgatcggctgaacgattttccttctgggctttgtgggtacgcgtttgctttaccgcctcatacgctttaataactgcgcgggcacgcaggcgtgaggctttccagcctggtgaaaacaggccaatcgcatcatctaaaaaactcatccaaacctcgccagcctgtagccgggtcgcccacggcgtttgttattgagcgttgccagtcgtcgctcccattcctgacggccttttctgatttccgacaggttttcgagcgtcatctgctgcccgttgaaagtgattgatttcccctccagaacagacagctcggctgcagcatagcggtcgatcatgttttgaatatctgctggattcacacccaacctcctgacgaagaccacggattagcctgctcggttacgggcttctcacgttttggttttggtttagatttcggcgcaggcggcggggatggcatttcgccagcttccgtctgcgtgtcctcgatccacgtttcccgccgtgcccactcaggagctgacggccatttgattttttcgtaaccactaaggatggcgagcgcgtcggcataaacgagcaggtcaaatgcttcgtttgcgccccggccgggcttactccatttcccttcattcgagcgttcctcatacgtcagttcgtcatagaaccagctgcccagccaggcggggaaatgcacatagccagggccgggtgaatcacgccacagcgcattattcacccggtctttaagggcatcggtctggagaagataaagaggcacatcaccagtcgcctgtgcgcggcgcgttgatctgcccgtgttgtcgggaaacgttcgctggataagtttgctgcgcctgacgctgtcccctttgaagagatagatacgcttacccagcccctcacggcgacatctgcgccagaacttgtaggcattatccgtcacgccatcttcgccccctgagtccacggccatcgacatcagccgcatgccctttgatgggtcagctgcgagcggccacgttttatcaaagacgtcagtgagtaaaagatcccagtcctccggatagctcgccggatccacctgaatgctttcaccgttgccgtcgcagcgcagcgaatgccggatgttgtaacggtcaactatccagcgctcacccatacttccataacccgtaatctgcacaacaaagcgccggttgcgcccggcctgcacgtccacggtcgcagtgagaaactgcacgccgttcggtaccgaacgttttgggacgtcttcggcacgctgctcgagcaattcacttttacgctgctccatgctggctcgcggcaaatagggcctgccgaaatcggtgttgatcaccgtcttcagggtttcttcgctgcgcgtggattcatattcctgctcggcggtcagaaacttataaataagctgcgcccaggtctggtaagcagctgccggaccttccatccagaaggaggcaatacgggaacgacggccatcaccgctaaccaggcctttcctgtcgatggtttgcccgtcccggagccagacacatttcatgttaagcgcacgcttcatgtccggtgtgatcctgcctttacaggcagggcactgaagaaacgccgcttcgctggcaagcacaggatcgctgctgtcgcggtatccggtcatattgtccatttccggctggaaatattcgccgcaatgcgggcatggccagtaaagacgacggcggtcaccacggttatagagcgataaaattccggtggtcggaggggcttcatggggcgtggagcgccgccattttgtgtctctgatatccctcccgggcgagctctcaaccagcgtcatcccggaggacatgaatgtcgtggttcgtttcgatgccagtgaaaaagcatccccctccccgtcgatatcttccggaaagcggtcataatccgtcagcgccacacttttatagtccgaggacgacatgatattgacggatggccagcccagcttcagatagttaccggcgcggaatgtacggtcgtagacgttgttatcgttacgtcttgggcttagccgggttttaacttcagggctacagcgaaaagtacggtccaggcgttttttggaatgctcgcgcgctttttcctcagatacctgaattacaagcatatctgccggatcgcagacaatgttataaacgatccagccgtcaatcagcccgatggttttacccgttcgcgctgggcccacaaacacaaccgcatcgtattcacgcgatgccagacagttcatcggctcaatcacatagggtgccagatccggatcccacggaactgagtttcccgcccccattggcacgcgcatataagtactgaccgcatcggccaccggcatacgacgcggggctcgtaaaataccggaaacatcgcggcggatgtccctggcggatgcccgctttgccatcagtcctcctcaggctgctcctcctcttttccagcgtcctgcaccttctccgccatctggtcgcgcagatcatcgataacgctttgcacacgaactaccgcagcaggcgttaaagcacagtcgcgctcgagcacatccgggagggtttcaagtaccatgacgacggctttcgccatcaatgagaattctcgcgccacttcatctgcgggtattaactgccccgtatcctgttcgaacttcagcctctcgttctctgctttccagtgggacagcctgtcagaagggggcatatcgtcgatgttggccgaaacggtagggatcatcagttcggtcagaatgtcggtcaccagatagagctttaacttgctattgctgcctggagcaggttcaacatttttcagtctcgcggcaaccgtctgacggtgtacgccggttatccctgccagctggttgatattgagttttaaagtggcaatttcctggtccatgatggtgaacactttttgaacgattcgacatgttgcgaaaatggcctctaattaaatcaaagacctgcgcacatgatgatgatgaccctggatccgaaaaactagccgtttcccgcgagcacgccgccccgtggcagggtccccctccgggagtaccttttgataataattatcaattgcacactatcgacggcactgctgccagataacaccaccggggaaacattccatcatgatggccgtgcggacataggaagccagttcatccatcgctttcttgtctgctgccatttgctttgtgacatccagcgccgcacattcagcagcgtttttcagcgcgttttcgatcaacgtttcaatgttggtatcaacaccaggtttaactttgaacttatcggcactgacggttaccttgttctgcgctggctcatcacgctggataccaaggctgatgttgtagatattggtcaccggctgaggtgtttcgattgccgctgcgtggatagcaccatttgcgatagcggcgtccttgatgaatgacactccattgcgaataagttcgaaggagacggtgtcacgaatgcgctggtccagctcgtcgattgccttttgtgcagcagaggtatcaatctcaacgccaagcgtcatcgaagcgcaatattgctgctcaccaaaacgcgtattgaccaggtgttcaacggcaaatttctgcccttctgatgtcagaaaggtaaagtgattttctttctggtattcagttgctgtgtgtctggtttcagcaaaaccaagctcgcgcaattcggctgtgccagatttagaaggcagatcaccagacagcaacgcgccacggaaaaacagcgcataaagcacttcattagcagcgccagatagcgtaatgattttgttactcatggaatatttccttttaggcgtgagcctgtcgcacggcaatgccgcccgagaggtaaacgcaacctaacggcatcacccaggctcactactgaaagactctctttgatgtgcgcgtgcgatgcgcgtagaagactgatttatcaacctgtctttatatcaggattcattacctgactatttgtgggtaaagttcgtagtgcgctgatcgtgcaaaatgattttagttgggaacagttcgcaactctgtcccataaaaatcagcatattcccatctatcccatatccagcgcattgaccatcgggatactgaagggagattccatcatctcttagaaagatcaccatctcttttgtttcaatttgcatatagctacctggaggatttatgaatgcaaggattttcatggactattaccatgagattgattttccatctttattcgcgagagcagtggaaagcgatgacgatgtgggtactacattgcgcattcacctactttgtgagcgcatggtcgaagcatggatatgcgcatgctgtgactgccaagatctctttggaagagataaaaacaaacttttaatcgaatgtaatactaaaatatccatggcgggaaacctgggaatccccccggaacttatgaaatcacttaaaaccatcaactcaatgcgtaatgaccttgcacacaatccatcaatacaaagcattgctgattcaaggatccagagcctgaaggatactctgactgaatactttaaacagcatccaacggaacccagcatggaagaatcaaaactgggtatttttaacgccgagaatcaattaaccgaagaagtttccttagatagtgacagttcaaaaaacagacttaagttaatcttgctgttcagcaagttaatgcaggcgttaatgcaattagttgcagctaatcataatgggcgctgggataaccaatttagccaattcgtttaccatgtgaccatgaacgcaacaaagagataaatccaagcccgttttgtacgggctgttgcattatcacaggcactcagtgaatgcctgctgtaatgccgctagtcgtcgagttgcaacacaccgtg

SEQ ID NO: 1433 - DNA, 49496 bp, Artificial Sequence
  source: /note="Description of Artificial Sequence: Synthetic polynucleotide"
aggcctctcctcgcgagaggcattttttatttgatgggataaagatctttgcgcttatacggttggatttcgcccggtttgcgagttttcagcaattttaatatccaggtgtattgttctggtcgcggaccaacaaaaatctcgacttcttcattcatccgccgcgcaatcgtatgatcatccgcctctaacagatcatccatcggtgggcgcacctgaatcgtcagacgatgcgtcttgccatcataaatcggaaatagcggtacaacgcgcgcacggcacactttcatcaaacgaccaatcgcgggcaacgtcgctttataggtggcaaagaaatcaacaaattcgctgtgttctgggccatgatcctgatcgggtaaataatatccccagtaaccctgacgtaccgactggatgaatggtttaataccatcatttctcgcatgcagacgaccaccaaagcgacggcgcaccgtgttccagacataatcaaaaaccgggttgccctgattatggaacatcgctgccattttctgcccttgcgaggccatcagcatggcaggaatatcgacggcccaaccgtgcggcaccagaaaaatcactttctcgttattacgtcgtatctcttcgatgatctccagcccttgccagtcaacgcgcggctgaattttctccggcccgcgtattgccaactcagccatcattaccatcgcttgcggcgcggtggcaaacatctcatctacaatcgcttcgcgttcagcttcactacgttctggaaagcagagcgacagattgattaacgcacgacggcgtgagctttttcccagtcgtccggcaaaacgtcccagccgtgccagaatgggatcacggaactttggcggcgttaaagcgatacccgccatcgctgctacgcccagccatgctccccagtagcgcgggtggcgaaaggatttatcaaactcaggaatgtattcgctattattttttttcgtttccatgcttttccagtttcggataaggcaaaaatcaatctggtgatagtgtagcggcgcaacttgccccgcaccaaataaaaaagccggtactgactgcgtaccggctgcgaatggatgttaattaatcaaaccgtagctgcggcacaatctctttggcctgtgccaggaattcgcgacgatcggagccggtcagcccttcggtacgcggcagttttgccgtcagcgggtttacggcctgctggtttatccatacttcatagtgcagatgcggcccggttgaacgtccggtattaccggaaagcgcgatacggtcgccacgtttcaccttctgtcccggtttcaccaggatcttgcgcaagtgcatataacgcgtggtgtagctgcgaccatgacgaatagccacataataacctgctgcgccactacgtttggcaaccaccacttcaccgtcacccactgaaagcactggcgtaccttgtggcatggcaaaatcaacacctctgtgtggcgcaacgcgaccggtcaccggattagtacgacgcgggttaaagttagatgagatacggaactgtttcgccgtcgggaatcgcaagaatcctttcgccagaccagtaccgttacgatcgtagaatttgccatcttcagcgcggattgcgtaataatctttaccttctgaacgcaaacgtacgcccagcagctggctttgctcacgtttaccatcaagcatttctcgtgacattaacaccgcaaattcatcgccttttttcagtttgcggaaatccatttgccactgcatggctttaatcactgcgctcacttcggcgctggttaaaccggcgtttctggcgctggcaacaaagcttcccccgacggtacctttcagcagattgttgacccactctccttgctgcatttcgctggtcattttaaaaccgttagcggcagtacggtcataggttcgggtttcacgacgagacacttcccaggtgaggcgctgcagttcgccgtccgcggttaatgtccaggagagttgttgaccgattttcaggttacgcaattctttgtcggcagcagccagttgggtgatatcacccatatcaataccatactgattgagaatgctgcttagcgtatcgccagtggaaacaacatattcatgcacgcccgcttcaccggcgattttgtcatccagttcgtcctggggaatggcttcatcttcttgtgcagcttgatcaatcggctcactggcttcaggtaagagcgaacgaatttcgttctgttccagctcaatggttttgacaattggcgtggcatcgcggtgataaacatagggccgccagacagcgacggccagagtaagaacggtgagcgaccccaacataacgcggtgtggtcgcggtaaattattaaacgccagggcgacagagcgggctatctgttgcacgtaatcacttcctcattaatctcctttcaggcagctcgcatactggttggctaattgattcaggaattctgaatagcttgttttacccagtttgatattcgtccccaggggatccaacgttcccatacgaacggatgtccctcgtgcgacgctctcaacgaccgctggcctgaactgtggctcagcaaaaacgcaggttgctttttgctcaaccaactgtgttcttatttcatgtaaacgctgcgcgccaggttgaatctcagggttaacggtaaaatgaccaagcggtgtcagtccgaactgtttttcgaaatagccgtaagcatcgtgaaaaacgaaataacctttccccttgagcggcgcgagctcgttaccaacctgcttttcggttgaggctaattgtgcctcaaaatccttcaggttggcgtcaagtttggctcgactttgcggcataagttccactaattttccatggattgcaaccgctgtagcccgcgctatctctggggaaagccaaagatgcatgttgaaatcgccgtgatggtgatcttcgtcacttttttccgcgtggtcgtgatcatcatcatcgccgtgaatacttttcatcagcagcggtttcacattctctagctgcgcaatcgttacctgtttcgcttcaggtaatttacttaccggtttttgcatgaacgcttccatctccgggccaacccaaacgactaagtccgcgttctgtaagcgttttacatctgatggacgcagtgaataatcatgttctgaagccccgtcaggtagtaaaacctccgtttctgttaccccatcagcaatggcagaagcgatgaacccaacgggtttaagcgaagcgacaacggcagcatctgcggcctgtgttgcaccgccccagagagcggcggataatgctgcgaaaagaagcgtttttttatgtaacataatgcgaccaatcatcgtaatgaatatgagaagtgtgatattataacatttcatgactactgcaagactaaaattaacatgacaagtctggtttccctggaaaatgtctcggtttcttttggccaacgccgcgtcctctctgatgtgtcgctggaacttaaacctggaaaaattttgactttacttgggccaaacggcgcaggtaagtcgacactggtacgggtagtgctcgggctggtaacacccgatgaaggggttatcaagcgcaacggaaaactgcgcatcggctatgtaccgcagaagctgtatctcgacaccacgttgccactgaccgtaaaccgttttttacgcttacgccctggcacacataaagaagatattttgcctgcactgaaacgtgtccaggccgggcatctgattaacgcaccgatgcaaaagctctcgggtggcgaaacgcagcgtgtactgttagcgcgagcattgttaaatcgaccgcaattattagtgctggatgaacccactcagggcgtggatgtgaatggtcaggtggcgttatatgaccttattgaccaactgcgtcgcgaactggattgtggcgttttaatggtatctcacgatctgcatctggtaatggcaaaaaccgatgaagtgctttgcctgaatcaccacatttgttgttccggcacaccggaagttgtttccctgcatccggagtttatttctatgtttggtcctcgtggtgctgaacaactgggtatctatcgccatcatcataatcatcgtcacgatttacagggacgaattgttttgcgtcggggaaatgatcgctcatgattgaattattatttcccggttggttagccgggatcatgctcgcctgtgccgcgggtccgctgggttcgtttgtagtctggcgtcgtatgtcttatttcggtgatacgctggctcatgcctcattacttggcgtcgcgtttggtttgttgctggacgtgaatccattctatgcggtgattgccgttacgctgctgctggcgggcggtctggtatggctggagaagcgtccacagctggcgatcgacacgttattagggattatggcgcacagtgccctgtcgctgggcctggtggtcgttagtctgatgtctaatattcgtgttgatttgatggcttacctgttcggtgatttactggcagtgacgccagaagatctcatctctattgcgattggcgtggtcatcgtggtggctattttgttctggcaatggcgcaatttgctgtcgatgacgattagcccggatctggcgtttgttgatggtgtgaaattacagcgcgtgaaattgttgttgatgctggtgacggcattgacgattggtgtagcgatgaaattcgtcggcgcgttgattattacttcactgctgattattcctgctgctactgcacgtcgctttgcccgcacgccggaacagatggctggtgtcgctgttttggtggggatggtggcagtgactggcggtttaaccttttccgcattttacgatacacctgcaggcccgtcggtggtgctatgcgcggcactgttatttattatcagtatgatgaaaaagcaggccagctaatctgtcgctgaacacatttgtcggatgcggcgcgagcgccttatcccacctgcggttcgctatctctggtaggcctgataagacgcgaacagcgtcgcatcaggcacactgccagtgtcggatgcggctcgagcgaccaatccgacttacggcatttctggcggcgtgatgccgaagtggttccacgcccgcactgtcgccatacgcccgcgcggtgtacgctgcaaaaagccttgctgaatcaaataaggttccagtacatcctcaatggtttcacgttcttcgccaatggctgccgccaggttatccagacctaccggcccaccaaagaacttatcgattaccgccagcaacaatttgcggtccatataatcgaaaccttcagcatcgacattcaacatatccagcgcctgagcagcgatatctgccgagatggtgccatcgtgcttcacttcagcgaaatcacgcactcgacgcagcagacggttggcaatacgtggcgtaccgcgcgcacgacgagcaacttccagcgcgccgtcatcactcatctcaagccccataaagcgtgcgctgcgactgacgatatattgcagatccggcacctgataaaactccagacgttgcacaataccaaaacgatcgcgcaacggtgatgtcagcgaacctgcgcgcgtggttgcaccaatcagggtaaacggcggcaaatcaattttaatggagcgtgccgccggaccttcaccaatcatgatatccagttggtaatcttccattgccggatacaacacctcttccaccactggtgaaagacggtggatctcatcaataaacagtacatcgtgtggttcaaggttagtgagcattgctgccagatcgcccgccttttccagcaccggaccagaagtcgtgcgtaaattaacgcccatttcattggcgacaatattggcaagcgtagttttacccaaccccggaggaccaaaaatcaatagatgatcgagggcatcgccgcgcagtttcgctgctttgatgaaaatctccatctgcgaacgaacctgcggctgaccaacatactcttccagtaatttagggcgaatggcgcgatctgccacatcttccggcaaagtggtaccggcagaaatcagacggtctgcttcaatcatcctttacctcataacgcggcgcgtagggcttcgcgaattaatgtttcactgctggcgtcagggcgagcgattttgctcaccatgcggcttgcttcttgtggtttatagcccagtgccaccagcgcagcaaccgcttcctgttcagcatcgtcggtcgccgggctggcaggagacgtgagtaccaggtcggcggctggcgtaaagagatcgccatgcaaacctttaaatcggtctttcatttcgacaatcaagcgttcggcggtttttttgccaatacccggcagtttcaccagtgcccccacttcttcacgctcaacggcattaacgaactgctgcgctgacattccggagaggatcgccagcgccaacttcgggccgacgccgttggttttgatcaactctttgaacaacgtgcgctcttgtttattgttaaaaccgtacagcagttgcgcgtcttcacgcaccacaaagtgggtgaaaacgatcgcttcctgacccgcttcagggagttcataaaaacaggtcatcggcatatgcacttcatagcctacgccgcccacttcaattaacaccagcgggggttgtttttcaatgatgatgcctctgagtctgcctatcacatgacgctcctgcgtaatgaatcaaagataatgctgtatgataaaaaaatgctggatagatatccagcgaaggatgaagaaaacttgcgaggtgtctcgatgatctgaaaaatggcgcagtataatttattctacagattatattggaagcaaatatttaaatattacatattcagcgaagaaatgtgtaataaaaatacacattgcgacccctgaaaaaaataaattttttatgctattacgtatattcatatctatttcaatggaatgacaacgtgaatattaattatcctgctgaatatgaaattggtgatatcgtctttacatgtataagtgctgccttatttggtcaaatatcagctgcatcaaattgctggagtaatcacgtcgggatcattatcggtcataacggtgaagactttctggttgcagaaagccgtgttcccctctcaaccatcactacgctatcccgttttattaaacgctctgctaatcaacgctatgctataaagcgattagacgccggactaacagaacaacaaaatcaacgaattgttgaacaggttccttcccggctacgcaaaatttaccacaccggttttaaatacgaatcttcgcgccagttctgttcaaaatttgtttttgatatttataaagaggcgctatgtattccggtgggtgaaatagagacgtttggagaattgttaaatagcaatccaaatgcaaaactcactttctggaaattctggttcttaggttctattccgtgggagcgtaaaaccgtcacgccagccagtttgtggcatcatccgggtttggtgttgattcacgcggtgggagttgaaacgcctcagcctgaactgaccgaggcggtataacttaacgcagtcgccctctcgccaggttcagtcgcgattcgctcatttgcatcgcattctgactaacgtggcagtgggtgatggcaatcgccagcgcatcggcggcatccgcctgtggattagcgggcagtttcagcaaggtgcggaccatatgctgcacctggcttttttcggcactaccaatacctaccactgtttgctttacctgacgtgccgcatattcaaataccggcaattcctgattcaccgccgccacaatcgccacgccgcgcgcctgccccagtttcagggctgagtcagcgttcttcgccataaagacctgttcaatggcgaaataatcaggctggaattgggtgatgatttccgtcacgcccgcatagatgagcttcagacgagacggtaaatcatccactttggtgcgtatgcatccgctacccaggtaggacagttgcctgcctacctggcggatgacgccatagccggtcacgcgcgaacccgggtcaatgccgagaataatagccatcacgcgtctccgttttgctgtttagcaggcctcatcagagagtcgctgcaacctcatcagagatttcaccgttatggtaaacttcctgcacgtcgtcgcaatcttccagcatatcgatcagacgcatcagtttcggtgcggtttctgcatccatatcagctttggtggacgggatcatggaaacttccgcgctgtctgctttcagacctgccgcttccagagcgtcgcgtactttgcccatttcttcccatgcagtgtagacatcaatcgcgccgtcatcataggtcacaacgtcttcagcaccggcttccagggctgcttccatgatggtgtcttcatcgcctttctcgaaggagatcacgccttttttgctgaacaaataagctacggaaccatcagtaccgaggttaccgccacatttgctgaatgcatgacgcacttcagcaacggtacggttgcggttgtcagacagacattcaatcatgattgccgtgccgccaggaccgtaaccttcgtagatgatggtttccatgtttgcatcatcatcaccgcccacacctcgtgcaattgcgcggttcagagtgtcacgggtcatgttgttagacagtgctttatcaattgctgcacgcaaacgcgggttagcgtccggatcaccaccgcccagcttagccgcggttaccagctcacgaatgattttagtgaagattttaccgcgcttagcatcctgcgcagctttacgatgtctggtgttggcccatttactatgacctgccataaaaatatctccagatagccctgcctgttcaggcagcgttaattacaaactgttcaatcgcctgccggttgctccaggacttagtgagcgccgccgcagcagacgcatcaagccacttgtaagccagatgttcagtgaaaacgatctggcgctcgtgcggaagcgcaagacagaaccatgattccgtattacgcgtcacgcccggcgcatagcgatgacgtaaatgtgaaaaaatttcaaactctaccgtgcgctgacagtcaattaaggtcagttgttcagcgacaacatcaatggtgacctcttcctttacttcgcgcatggcagcttgcggcgcggtttcaccctcttccacgctgccggttaccgactgccagaaatcgggatcgtcacgccgctgcaacatcagcacccgtttcgtatcttgtgcgtagatgaccactaagatcgaaacgggacgcttataagccatatcagttattctcagccttcttcacaacctgaatgctcagctcagccagtgcagtcgggttagcaaagctcggcgcttcagtcatcaaacacgctgccgccgtggttttcgggaaggcgataacgtcacggatattgtcggtgccggtcagcagcatcgtcagacggtcaagaccgaatgccaaacctgcgtgcggcggagtaccgtatttcagggcgtcgagcaggaagccgaatttctcgcgctgttcctcttcgttgatacccagaataccaaacaccgtctgctgcatatcaccattatggatacgcacagaaccaccgcccacttcgtaaccattgatgaccatatcgtaagcgttagccaccgcattttccggtgcagctttcagttctgctgccgtcatgtctttcggtgaggtgaacggatggtgcattgctgtcaggccgccttcaccgtcgtcttcaaacatcgggaagtcgataacccacagcggtgcccatttgctttcgtcggtcagaccaaggtctttacccactttcaggcgcagtgcgcccatcgcgtcggcaacaattttcttgttgtcggcaccgaagaaaatcatatcgccatcttgcgcgccagtacgctccaggatggcttcgatgatttctgcattaaggaacttcgctaccgggctattgataccttccagacctttcgcgcgttcgttaactttgatgtaagccagacctttcgcgccgtagattttaacgaagttaccgtattcgtcgatctgcttacgggtcaacgatgcgccgcccggaacacgcagagcggcaacacggcctttcggatcgttcgccggacctgcaaatactgcaaactcaacagatttcagcagatcggcaacgtcggtcagttccatcgggttacgcagatccggtttatcagaaccataacggcgttctgcttctgcaaaggtcattaccgggaaatcgcccagatccacgcccttcacttccagccacagatgacgcaccagcgcttccatcacttcacgcacttgcggcgcggtcatgaaagaagtttccacatcgatctgagtaaattcaggctgacggtcagcacgcaggtcttcgtcacggaagcatttaacgatctgatagtagcggtcaaagccggacatcatcagtagctgtttgaacaactgcggggattgcggcagcgcgtagaatttacctttgtgcacacgagaaggcaccaggtagtcacgcgcgccttcaggcgtggctttggtcagcatcggagtttcgatgtcgaggaagccgtggtcatccataaaacggcgcaccaggctggtgattttagcgcgggttttcaggcgctgagccatttccgggcgacgcaggtcgaggtagcggtatttcagacgcgcttcttcggtgttgacgtggttagagtcaagcggcagaacatctgcacggttgatgatagtcagcgaggacgccagtacttcgatttcgccagtcgccatatcgcggttaatatttttttcgtcacgcgcacgtacggtgcccgtgacctgaatgcagaactcattacgcagttcagaggccagctttaacgcgtccgcacgatccggatcgaaaaatacctgcacgataccttcgcggtcgcgcatatcgatgaagatcaggctaccaagatcacgacgacggttgacccaaccacacagagtcacctgctgccccacgtgggacaaacggagctgtccacaatattctgtacgcatgagatatcccttaacttagctgccggcggatgccccctgctgcgcaggtgaccaagtcgcagcgttagctgtatgtcacaactgaatgaaaaaaggcggctattatactggaaattctgccgcaccgtaagagcctggcccgcgctggaacgcctcgttaccactttatatcgggcctgaaatcagactctacgccagtttgctataaaggtgttgcccgaactcataaaaattaacaaaatttgtcgttccgccatcggctaatcgcattaaggtgagaggcacgattttgttttgtcaggagtcatcatgcttgaacttaatgctaaaaccaccgcgctggtggtgattgatttacaagaaggcatcttgccttttgccggaggtccacatactgccgatgaggtggttaatcgcgccgggaagctggcggcgaaatttcgcgccagcggtcagcccgtgtttctggtgcgcgttggctggtctgccgattacgccgaagcattaaaacagccggttgatgccccctcccccgcaaaagtgttgcccgaaaactggtggcaacatcctgctgcattaggtgcaaccgacagcgatatcgaaatcatcaaacgtcaatggggtgcgttttacggtacggatctggagttgcaattacgccgccggggtatcgatacaatagtgttatgtgggatctcgaccaatatcggtgttgaatccaccgcccgcaatgcctgggaactcggttttaatctggtgattgccgaagatgcctgtagcgccgctagcgccgagcagcacaataacagcattaatcatatctacccgcgcatcgcccgtgtgcgtagcgttgaagagatcctcaacgcgttatgatttacatcggtttgccacaatggtcgcatcctaaatgggtgcggttggggatcaccagccttgaagagtatgcccgccactttaactgcgtgacgcgggcattttaaaaatcactaaagaacgcccaagagcatgtgttttctttagtttattcaatgcattaaaaaatagtttcgcatgaaattcggtaaacttcatgtgtgcaataatgtcccattcatgccccaaaatgccccaaagcagacatttttgccccaagtatgccccacaagtcacgtcttcaagtcgtctatatccatagcacaccgagttacattcttgcatccggggtgtcgacaatacctactttattgagtgtgcgagaattaccaggaacctttccacaatgtagtagtctaatagtcgaatccatctaacattaagaagcgttatgatcactagcctctcattgatatcttctgtaatagtcactctatgtatcatggtgttcgctacagtaaaggtagggattggtttgtctaacaatccagacagaaatgataattaacctcaaccacgtaaccacacttcatacttcatacttcacttaacagtgaagtgctcacatcaccgggcagtcatcaaactccgcattcctggcatcattaatgatgtacgtgatcactccaaatatagcgggtgcagaactgtaaccatcatcatctgctggcagcgcttcccttctcccgttatccagattaaccaggtgcggctgaggatgagtccgatatcgcttgatcctgaattccccgtcgattgcacatatcagcagtgaaccatcgcaggcagtaagtgacgcatccacaacaagcaacgctccctggattatcccttccctgaaatgtgaacgcgatgcccgcatgaaataagtcgctgcgggctgactgattagctgctgatcgagggagattcgtgtttcaacataatctgccgcaggtgaaggaaatcccatgtttacgccctctcttgaataccggataaaaacacagtataaatactgtatatccatccagcaaagaggcaatgagcaatgttcgtggaactcgtttatgacaaaaggaattttgatggtctgcccggtgcaaaagatatcattctgggcgagttaactaagagagttcaccggatcttccccgatgctgatgttcgggttaaaccgatgatgacactgccggcgatcaacactgacgccagcaagcatgagaaggaacagataagccgtactgttcaggaaatgtttgaagaggctgaattctggttagtgagtgagtaaagattttcaatgcccgccacagttacgtattgattatgctgtggaggatattcattttcgtaaacgttggtttgggagaagcggcaaaacggaatgtgggaacaggggaaaatcagataccagatatgtctgcatttccatctggcaataactggtttcagttaccaagtggacatatcgttcagatattttccatgaacgttcttggtgcagatgctaatggcacgtcagctaattaccccattgcttttccaacaacgatgattgctgtcagtgctctatggtctgatgggactgtagcaaatgcaccgacatacaagatgatggggaacacgactaacagaacaactttgacgataaaagtatcagccagctcaggtacttacgggacaatgattattgcggtgggacgataatatgaataaatacagttactctccttcagaaaatgccttttatgctgttgcgttaaaaaatacctatgaattgagtggcacatggccagctgatgcattagatattcctgatgacatttctgtaaaatatatggcggaaccgccacaagggaaaatccgagttgcaggggaaaatggttttcccacatgggctgaaatacctccaccatcacatgaggaacttattgaacaggccgaatcagagaggcaattattgattaaccaggccaacgaatacatgaacagtaaacaatggcccggtaaagccgctattggtcgtctgaaaggcgaggaactggcacaatataattcgtggctggattatctggacgcactggaactggtcgatacttccggtacgcccgatattgaatggcctacgcctccggcagttcaggccagatgacatccggcgcggtgctggtatctgttgcagtcaccgcgtcaatgtaatccagcacggcgttaagtcgggttgtttctgcctgagtcagtttccgtccggcctgtaatttcagctgaatcagactaatggaagccattgctgcatcaatcagtgattggcgctgtgcttctgccgcttctactgaggcaccgtgttgtgcctcagtatctgtcacccatttctcaccatcccatttatcatatggcgttaacggtgaaagcgtgacataaccgtttttgatggcaccgatataatccactgtaacagctgcgccattttcgattgagtaaacagtctcattgcgatggtcttcctcatggctccatcccttacctgtaaatactgccactcttcccggaatgttttcgtccgggtcaataccagtggaacaggcgggcatacttacgccagtattaatatattcatcagaccagcccgtatattcagacgttactgcatcataataaaaacaacgcatatcacccggcactgcagccagcccattttcatcaaaaacaggtttcattatttagccctcaccagaaagttaaatgcaatatttcgcggtctgacagcaacaaaattcacaccatcacccacagagttactgttgaaattaaatcgtgaaaatcctggctgatttccggcgatgccatcatgaaagttaattgcgtgtccagcacctccgcctatattcccggcaaactgagaaaagtttgtagcttcctgccagcttaataattcgcgaccaccatctgcacctcgcccgtcatcccagacacgaatgaaatcaccgcgggcttcaggtaataccagcgaaggaaacactttcgccagcacaggataatcagtggcagagaatttcgcgccgttgaacttcaaaaacaccatactggaccagctgtcgattacagtatttggcattgcagcggacggccagaagaacggaacgccaatagctggagaaccttctcccaaaccaaggtttgtgcgagcgtctgcggcattcgttgcgccggttccgccgtctgcgacagtaaccgcaccgttgctccctttctgcgcaagtttaccgatgcctgggatggttacggcggtgccgttgatggtaactgtgatgctttggtttgctgaggtggtggcgaacgtctcccacgcgccaatattctcgtcgtactctttgatgagctgtgacatggcctgcgccaggccgtcgactgagatattgtccgacacaaggattccatacttctggccgctcagcgccggggaaactgctggcgtaaccgtcattgacgtggcgctgttcacggatgaaatctgaaacagctgcaccgggttagacatcacgataatcgtctggccagcgcggacctggctggcgggagctgtccagtttgtgccggagccggttgcggtatttccgttaatagagatagttccggtgctataaatcataacaactcctaaatttagacaacatgaagcccggagaggtatataaccctcaccagaaataatttctgaattggtttttaatacatgttgggcaacgccagtgttggcatagctatagttgtatcaaatgccattgaccacccacccaaataataattgccgactactttattcctttctgctctgacattcccacctgtcattacaattcctttatacctaatatttccgtaaccaccaacgtgtcgacagttagccccggtataaacaatctggcaaaattcatcaccaatattcaggttcgcattggcgatatttattgtcccatcaaaaatgaatggcttcgtgcaagtaagaagacgtttgcgttgacgattggtttattcaatccatcaactaaaatatcatgtaaacgaattgccataacatttcccactttattttacttactcaacacaacaagtatattaaaattgaaccttgtcaacaacacaaaggagtcccaatgaaactcgctctaattatgctgccattatgtctgtccctcactgcatgtggtaatggtttaaataccggtaaaccaaattccggtgtcattccaaaacctttggatcgagatggtaacggttctttaatttatgataccgaaaaccttccaatgacggggcagtggtgtcacgagattgatcacgaataccgacgaatcggtagcccttctaactgtgttatagactactaaatattaacccctcaaaagaggggttaatattttaacctgtgaatgaaccagatccgtgtgatactatgatagtaggcgaagaaattgacgcacccctgttattttgagcggacactttaatacgcactgttacgtttggacctgttacaaccgcagaatgcatgataagtctctccatgtcttgcacggatgaaccactctcattgccgttaatgtcgattgttcctgcaccattacctttaacgtttgctataacacagacgtgtcttgcgtgcccagaactggatgaatcattataagtcattaccttttctaaatatccgtcactagaccgactcacattcgtccctgtgtgcatatttgcaatgtccccgataaaactttgggcttccacagtccctttgaatttaccgcttgttgcttggatctcaccagtaaagctaccgccactagcatatactacacctctgacggtcacattgttgaattcagcatctccagctttattcaacttccaaccagcagaaccagctgcatagttgttggactggatatagttaccgatttttgcgttctcaatggtgccgtcctggatgaagctggcccggatgaatgtctgcccgttctggatcacgaacggcaaagctacgctatttccggctgccgtggtgacggcgaagcggtcagccaggaagataacctgcgactgcatgccggatggcgtattctccacgccgatacccatccccgcggcgtaatactgcccgttgctggagacaccaaccttgatgttgtacatcgcgctgagttcgccattaacgttggctatagcctgagcgttagtggtgatggcggaggtatgcccgttcacggtcgccgtgatgccgtttatctgcgtggcggtggcctgctgatagtcggagagcgtctgattcaggctgttgatggatgccttgttgccgttgacgtccgtctgcaggctcagcaatgaacgtgctgtggcttccttctcactgacgatcacctcgtcgagacggtccagattcgcgctgttgccggcgaccgatgcagaaagggttttacgcgtggccacctgagcgaggttggcctggattatcgcaattgcagagttcttcaccccgcccgtcatgccgtccatagaaacgctgatgttgtcgattcgctggcccagggcggtatcagccgtcgcaacggtctgctcaagctgactgagtgaagacgaaacattcccgaccgtgctggaaagctcattaacgctggtctgaaccttcccgacgtcctgggcatttttggcgatatctttcgcttgctgctccagttcgtcgttggcctgtttgatatcgttagccatgccagcaattttttcgttgctgtccaccgcgttctcgatcaggtctttgaacgtttccgactctttcatatcctccagaatgtcattagttatttcgctgacatctatcgaggacgtgcccatgatccagtcggtccagtccccggcgttaccgatacggtcaatcaggcgcgcgcggtaccactggcgaacgccggcaggcatggggccatgctgataatctgcagccgggtacggcaccaggaccagcagttcaggattggcgtagtcggcagttgtggcgcgctgaatctctgtataggccgtgtcgcctgagccatccggaaatttccaggtcaggtcgatatgccagaccacatcttcggtcgccaggaagttgagcggagtacccggttttcccgttttaccggagagataagttgtttcaccgtatccccatggtgacgacgtatcctgcgcattcagcgcccgtacgcgcacgtcatagctgcccgaataaatgccctgaaccgagaaaccctgcgcgctggtaaccggaacgtttatccagtccccgttgtccttacgccactgggcaacataccggattgcgccctctaccttatcccatgacacgtccaggcttgctacagtcagcccctgagacacatgatcgctctcagtcaccacgatattcttcggagcagacaggacgcttatcggcgtgacggtgatcgggggagactcgacccgaacgccgtcatcgatgtaacgatatttgtttggatcgtgctgaacggccgtaatagtgaaaccgcctgtactgtcgtcgttagccgcgattgaggtgaccctgaagtactgtattgcgaggttatcactgtctatcgcccaaacagcgcccgccacaggaacctgactgaatgccgtagccaccgtcaccgtttttttatcggcgctcaccgcgctgattgtccgcgtctgggcttttccgtcgggaaggttaaccaccagccggtctttcgccgcgtagtctatttctcgatcgagggtaatttggcggccgttggccgcgcttatacggcccccgttctccttaccagagcggaaaggatcggcgacaccgataatttcagcgggcaaagggatataaccgtccagccccacgccaaacgatacggtcccgtctttggcattggagagcaatacccagcgaccgcgtcggtgcgcttcactttgcgaggtgcagccgattgcggtcagggacgtctgccggacgtcgtaacgttctacaagcgccgaatcgtaaaccccctcaacggtatcgctgtaatggttctgcggatcggaccaggacaccaggcaggagctgtagcgattcttgtatgagccgcccgcataagtaaacagcccatcgataacgtttgagacgttataaacccagtcaacatcgtcctgcgggacgtctgcctggacataaatctgatcgtttccccagaacgttattccacgaaataccgcggcgagatcgttaagtacctgccaggcgtcctcctggctctgaatgaaaacgttgcaggtgaaacgcggttcggtgccaccggccccgtcggaaaccatttcgtcacagtactgggcgattgaatacagcgcccacttatccaccatggacgcatccacgcgcgtgcccatgccgtaaatttcatccagaaccagatcgtaaaagatccaggcagggttattggaccatgccattttgaacccgccggaccatgaaccagaataggttcgggttttcggatcgtaattatccggaaccttaatcagcttgccttttatcttacaggtcactttcggcgcgctgccgttgaattggctgctgtccacttcgacatacaggagcgctgttaaaggataacgaagcttgctgtcgatgacttccgcatacgaaaacaccttgaaggcgttaaccagtttcgaatttgatccgctggcatcagccgtaatacgcctgaccctgacagaccagccggacgtggattttggcagatcgatacggtggtcacgctgatattccgtcgtggtctttccgtcaaacttgccgtttacaaccgttttccaggcgccgccgtccgttgataaatcgatcgcatactcggtgaccgtgcccaccatatcgccattatctttatagagatactggaccggaaggctgagcttgatacggatggcatccagggaaaggtttgtaaactggcgcgtccagggcgcggtggtggtgacagttgtgcccacggccagctcgttgtcgacctggggcatcccggcaatataggtctggtcctgtgtgcccttgcggaactcccatttcacgccgctgaagttgtattccccgctgtcgtttgccagcggcgtatcgttgagaaaaatgttctgagcggtcaggtcgccctgtatttccccctcagaaacggcaatgagcatttttaattttgcgaccgacagcagatcgtcaggctgctcaaccggagtatgtgaactgccacctccccctttggcaccctgcaggatggtttcttgtttaagaagctgcattttttcacccataaaaaaaggtgccgaagcacctttaagttagtggccgctggcctactgctgatcgctcgagtacataccggcgctgactatcgctccccctgcctcagtcagaccgtaggccagggggacaggatgccccatagcgacggtattgaccggcgccccgaaggcgtagttaggcgtgttgtccgtgctggaggatttacccgcgccgaaggatggctggggcgtgagcatctggacaacgccccccagcatcatcgacactccgacccctgtcagaattgacgtggcgctgatagctgttgcactcatcgccgcgccccaggctgccatgctcgcaccagcggtaaagaatgcagcgaccagcgcaacagccccgacaactatctgcaggacgcccgaacttttggccccctcataaacgggcacgatccggtacacgcttccaccgcgggtcatatcaaactcttccagcccgatattgttgccaccgttaaaaaaggcgaaacggatccccttcatatgagcttcagacatatattttttgaatccgggaacctgtgaacacatggccctgagcatctcgcgcaggtcggcaacatcaaactgaacgcgtttaccgaatttttttgccattttaccttcgagaataagcgtcttaaccatgcattctgtccttatgcctgaccacccggaccgttctgtcgcgataatattttccataaggcgttcgcgaagaaaggtgcccgaaaagatgatggagaatgatgttatcacccacatataccgcggcgtgattagtcaccgatgcctgcacactcatcatgatgatatctccgggctgcattgcaccggcggcaatctcaacgaatccctcacgctcccagttgtcgtcgtagagacgctccttgccgctctcccaccattcgtaaggtactgaataattgccgagaacaatgccgtattcgcgcagataaaattcacggataagcgaccagcagtcggcgtaacccagcacccactgccgcccggcataatcccggtcttcacgcggggaaatcgtacaaaaatccccgtccggccaggacatgatcccccactcaatccccgaccagtcgcactggatccggtccagctctgagggcaccagccgaaccacatccggatgggaatgaatgagcatgatgatctcaccgcgcgcgcgggcagcgagctggtcttccggggagagcgtgaatgtctcctcgggtttatcggcaatgttgcggcagggaataaagatttgttgctggcctgactgaacaatcaggccgcaggcttctttggggtattcagcagcgacgtgctgacggatagcatccagcaatttttcacgcatttttatttcccctgcaggtttgcagccggaaaaccgccgaacggcagcggcgcatccgggccgtgacgatcctgacaatcctgccggcggccgccacaaacatctttcgacgggtcatcggtcggtgtaccgtctttggtaaagtatttcgtgccgttgtaatcgcatccggtcccgcttcggtaccagccccgcatacaccaggtgcagacaggcgtaatctgccgtgtcggcagctgcaggctctgaatatcgaaaggagaacacagctcgaaatcaacctgtacccgcgtctctgcggttttagcattgacgtaaaagagctgtaagcgctcatcggccgggctggcacccggattaccgtttttccagttggcggcatcgagatacttcgaaagcgtggtatggattttgaccttagccctgaccatatcgtcatattcaagacacagcgcggtgacatagtttccgacgttcccgacggacagcgtgggcgttggctgggaacctgtactcgataactccatccccttaagttcgtagggatggggatcgtactggtttccctgccagataatggcgggcagattttctgcggcgaaggctgcccacccctcttcctgaatattgtgcgcatgaaaacgcagcacctgatccataccgaattcagtgccgtcgatctcaatcagctgaataacgctgccgggctcaagctgttgtatgtctgccgtaaaactcatactccccccataaaaaaaagccgcccggaggcagctttcagtgtttttcgagaaaatcagggcgcgaacgcctgttcaaaagtgaaggccacagtggcttttttcccggtagggaaagaaacgctgaacgaatcggccttcattctgaacagctttttttcaccccatggagtggtccaccagaacgatttagtaacgtgagacatcaggaaagcgcgcagcgcagccgcctcctgtctggtgcccgtccagtccaggttccacgtttcctgtttgtcgttgatccccatccccgctatctgtttgtagccatccccgaactgggcctgcagcgttcgggctgtttcagtgccctgcgctgtttttcgcgtgcgccaggtaaacgtgtccgtcactgtgtcctcctcgaataaagcacgccgcccgcggacatttcttttttcagtcgctcggtgattgtctgctgaacaatcgcctgcagctgtttcgccgtccccgtggcgttcgcctgatttatgcttccgtcactcccctgctggctgatgctgactggggcataaacactgatcccgcccatgccagcaccggctgcgttcccgccgccgaccagaccacccgaggcatacccgcgcatcaggcgatagagattagccacgccgatgcggctggttgattctttggtgaagacgaattccccgcggtgaacgataccggctggctcgtacttgccgccgtgcccggtaaaaccgcccacgtcaaaaccctgtggccggtatgacgggaccgcgaatgactgaccggcagaggaggttttcgccccgccgctaacccagcccattgcactctggatggtgtaagccaccagcagctggttgataacggacacaatcattttaaggatcgagctggtgaattccctgaagctcgccttcccggttgtcgtcaggctggtaagctggcccgccaacccgctgaacgtagcctgagaaatctgctgaacggagctgaaaacgtttgtcgctgaatcctgatattcggcccaaccctgtttcgcaccggccagccagtttgcacgcagggcatcttcagcttcgaacgtcgccctttgctcttccagaaccttttgctgcgcctgagggttgtacgaatagctttcgctgagacgctgcagcgtagtttgtcgcccggcttcccgggtggataacccctcagactgagcctgcaggcccgccctggcggctttttgctgctgctcaaacttcacggcctgatcggccagctggttgagcttttgctggctggcaaccttatcgcccaggtcggccagctgccgcttgtactcgagcgtttcttctttgtgcgccagcagggatttttcctgcgccgtaagctgacgacgcccagcggcctcctgcagaacggtgaactgattttcagtttgccagagatcctgacgctgtttacttatgacgtcgttcacgctggtatgctgctcaagcgttttaagctgggcctgaagggtgagaagttcggcctgcgccttttcctcggctttgtccccggcgggcgttgagtagcttttgcctttcggtgtttttggatccttccactgcttttcaatcccggcgcgggccgcggcaatgtccttttcagtccacagcgtggcgacaccgtctttcgcatcctggcggtttttctcaataagctgactgagctttttctctgctgaagcccgcttttctgccgccgtcgcgccggactccaccagctggttaaactgctgctggctgcggattgcctgagcctgctggtccgttcgcattttttcccgcgcggctgccagcccttcctgggcgtattgctgatcggcaagatcgtaagcctgctttttcagctccacctgctggcgcgcgtttctcagcctttccgcatccgctttctgcagaacgttgttaccggcataatccgggtcgaccttaagattgctggacagcgcgcggtactctttctctgctgcctgccactcagcaaaagagtcctggcgcttcatcgcggtgtcaggattacgcccgacgcccagcatcgcatcccacgcaccggaggcggcattcttcacccagttccaggctttttcgagggatccgagattatcctcgaccgcaccggcgcgctgaatgaccgcgtcggaatatgcccgcatggccagctcggcagccttctgagaatcccccagcgcctgagcagaagctatctgttcatactgggtggctgtcagaaaatgaagggaatcgttgagcgtcgcgaccgcgttaaccggatcatccttcaggcgtttaaactgatttatggtttcgtcaacggcctgcccggtagcctgctgcagcctggcggcaacattgctgaccatgctgacgtcattaccgctgaacgcgccgctgccaacgacctgcgccagcacgcctgcagcggcatgctgagtgatgccattacctgccagcgagcgcgccagcgcctgcagctgccctgacgttttccccgcgtagttcccggtcaggatcagctgcctgttaaattcctcagactctttgctgccgtcgtaccaggccttacccaacccgaataccgccgcggcaatccctccgaccatgctggcgatcccaagaccgcgcagtgacagaagctggtctatccaccctgcccggttagccagcgtgatcccggagccgcgcagcgcgccgaagttaccgcgcatgacctcgccgatcagtattcccagttcctgccgggcggcggcactttgcagccccagaccgtgcgtggcgactttggcagcttcgagcttgcggatatagacttcagccgcatcgctggcaccgacctgcgccgccttcatgcgcagtagctcggtaccggagagcttttgctctgcaacctgttgcttcagctggctgaggaatcgcgtgcgcgctgcggccgatttttcctccacgatctgcagttctttttgacgggccgtggtgcgggaaataagggcgagataatcctgctgggttatgttgccctgtgccctcgctgcgcgaaagcgcgcctgcacgttcgcaagcgactgtgtttcaccattgagctggcgtacgccgtcgatctggcggaaaaatgatgccgcaagttcatcctgtcgacgggcaagcgcagcggcctgcccgtcattctcacgcatgcgctgattaagctcggtcacgcggcggtgagtttcatcaacggactttgaaacgttctgccagtctttggtaagcccttccgttgcggccgactggcgggatttcatatctgcggcagccgccgcgccagcgtcacccacggttttaaacgcagccgcctgccgctctgaagcgcgctgcattcgcgtctggactttttcagagtcctcagccatcccggttagctggccctttatgcgggcaacctgctcactaaacgtggcgctgtcgacgtcaaggttgatgaccagatcgctaatctgctgggccatatcggatacctcctgttatcccctcagctgcggccatcagcgcatcatcatccggctcgtcatcgctgatgacgataccggaaggagaaagcaggctgaaatgtgcgggggtaagttccgggtcgcggaagaaaagagtggagatggaataaagcagctctgagaaatgcgcatcgagctgagcgtcctgaaaataatgctcccggtagaactggtgccagtcgcccagctcagtggaagtcattccagccagcatggcgcgccagtcgggtcgcccgaactcgcgcgccagattcaggacaaacttcagctcgctggcaagggcttttccgccgcaacgggttctgcgctttcggcctccgctggggcatccggatcggcagctttgtcatcctcaaccggaacgagcatgccggagagcagctttatttccatttctgctttaccgatcgcctccggcggccagccgctaagcacctgctggtaaagcgtctccacatccgtgccagccggatcgttatgccacaaagacatcgcaatcaaacgcgcaccgcagcgaatatttgagccaatcagcctggccgtcatttcctgatcgctgatgccgtcgctgtcagcgctgacggccttttcctctgcggccataaacgtgatgtactcaatacgctgaagcgccgacagctcgaagatggtcagtgattctttttgccaggtgaacttctcttttttcagaaacatgcgtccttccttacgctgcagttacggtaactttgcagaccgcaacgaaattaccgtcgctggtcataacaataacgtcagcggtgcctgccgccacgccggtgacggtgatcgcattaccgctaacggtgaccgttgcttttgccccgtctgaggttgccacacggaacgaggtatctgaggcactggctgggttaaccgtcacattgagcgttgtggttgcgccgacggccacgcttgccgtggctttatcgagcgtaacgcctgtcacggggatattcggggtcccgctttcttctgccagttccggcttgccggtattggtaattttcgctgtacgggttatgacctcttttgccggaatggctttacccaggctgctgcaccagccgcggaaaacgtcgacggtaccgttcgggtatttgattttgtaatagcgtactgagccatcaataaaccatgcgacaaggtctttttgcccttcttcgcccggcttccaggcgagggtgaacgaggtatcgccagcagattttgccccctgggccgtcgcgttccagtcggcatcctcgtcgtcgaggtaagtgtcgtcatacgattcggcggtcatttcgcccggcgtcagctctttaattttcgccaggcggttccagtcgatatccgagagtgggttagcgaaagcgttgcccgttccggtgtaaagccagagggtggtaccggcacctttcacaggggccagcgggtttggagtaggcataagtacctcttaaattgaataggtgattaagtacgtgaaatcgactgaaccccaggtggccatttcatcatcccgctgatagtcataaccctgcggggtgaacgtctcgaccagttcggtcagacctgggatgaaggccattgccggatacactttctcttccatccaggaatcaagcgcgctgtcggggctggaggctttaagaaatacctcgatgtgaacaaccgcctgccacgaatcttcgtcaagcgattacacgtcttgagcgattgtgtaggctggagctgcttcgaagttcctatactttctagagaataggaacttcggaataggaactaaggaggatattcatatggaccatggctaattcccatgtcagtccagtgattctgaataggcgataagtccggtataaccggggataatctcaccattatcagcttcaaattcaggaattgtgccggtggtgatggtgtattgaggctggccatcttccttcgcgaaggctgccaggtcttcaatctgcttagctgtaagaactactgtcatgctcattcctcagttgtaaaaaagccccgcgagtgcgaggcgatttgattgaattctcggctcttatctcagcgcagccccttactgcgtgccggttgctcggtgatgagcatcagcgatgagacattaaagccgaccgaaggccagcggcgttcctcatgttgccgacagagccatatcgacaagaggacgaaaactagcagcatgaatcgcctattggttattcgacagtcgcactgattcgtaaatccgctcacacgtcattcctgcccggtagctttcgtcagatcgtccagcataatatcgagctgcttctgcaaggcttccgagcatgtcggcaagcattgctgcgttggctccggctgttttgcttctgacggaagtggcgagatctgcggtgtgctttgcggcgtccatgtgggtagcgagttttgttgcttcggcgcgcagctgcttaacagtggtagccaggccagcagaagtaacggcagcgctcgctgcttgagcttgagcatctttaacggcctcatcccgggcgattgttcgcccttgttcaatcatacgagctgcggtctgtgcattcgcttcctgtgaagattccgcgctatcccggtcagcccactttattttccagctgcggttcgtccactcactgccagcgagaaacgaacctaccaacgcaacaatcacaatgatgcagatgccacccggcttcactggtctatcccccagcacgtcagtgcgctttcctggtcccgccgttctacctgcccataacatccatccttctggcccttggtcaggcggcaatcgcggccaccgtctttaatccaccagcggatagcttcacaggctcctttcgtatcgccagcattaattcgcttatagaacgtagacgggaaacattttccggggccgatgttatatgggcagaaagaagcgatacccgctttctgtggttcggtcagtggtactttgatatttcggtcaacccacgccagcgccttgtcgcgttcaatggcgtttacctgggcgcatttctcagctgacagcttcatgccctgtactactggcttgccatcaaccattgttgcaccacggcaaatggtccagagtccgccgccgtcgcgatatgctgtcaagctgttaccctctttctcatccagaaactgatcgagaatcacgggtgcggaagccccggcaagaatcaaaccaacgaccgctgcgctcaatttattcttcagctttagagacatagccattgcgccgatcctcccgttctttccagcggaaataccagttcactgcacaggtgattaccgtgcatgcgataccgacaataattgcccagtcgctcaggcttaaccctgcaattctgtcggccaacatccaggacacctcttttgctgttttagctgtttcggcatatgccttcgctgatacaccgcagccggcaagcgtggttcctgatccatatgaaagtctgctgtaaatggtgctcattctggtcatagcctcacctccgatagttcggatggcgctgtgtgtgattgaaggggatcaggcaaccgggctcttatgttcaagtaaaaattaaggatgattcccggtgcctgaagatggtgatcaccacagcaacgggggagcgtggtgatcgttatgattttttcagtttttccacctcttcggtggtctgtataaacctgtctgcctccagttctacgccgatcgcccgacggccaagttctattgcagctttcacagttgaaccagagcccataaagaaatcggcaacgatatcccccggtctgctgctggcgctaatgatctgtttcagcatgtcggcaggtttttcgcatggatgtttgcctggataaaactgaacaggcttatgtgtccatacgtcggtataaggaacaagagcggaaacagagaagcagcgccgaaggattttgtattcctccagcaattctgaatacttgcggtttaatgactggtaggtagccaccagctggtggtgaggatgttcaagcttttgctgaatatgtttatcgatggcgatccgcgtgaacagttcctgcaattttcgatagtccacttcattcggtagttgccattggcttgcaccaaaccagtgtgacgccatgtttttctttccggttgcctcagctatttctttcgagctgacacccagtgattcacgggcattacggaagtaatcaatcagcggcgtcataatgtgctgctttagctctgtgcttttcctttcgtaaacatcctctttacctgtatacggtccaagatagtgctcagcaaacaaaatccgttccgtagatggaaagtacgcacgcaggctttctttattacatccattccagcggcccgatggttttgcccaaatgatgtgattcaaaacgttgaatcgggcgcgcatcataatctctatatctgaggccagtcggtgaccgcaaaacaggtagatgctgccagcaggtttaagaacgcgagcatactcagccaggcagctatcaagccagcgtaagtagtcctcgtcccccttccattggttgtcccagccgttgggcttcactttgaagtacggaggatccgtaactataagatcaatagagttatccgggagggtggcgacgtaatgcagactatcagcgttgattaactcaacactgtttatttttacagtatttttcatagatcagtaagcgtaactctgataggctcacgttgcttttgcgctaaagcagtgggccttggttagcttgtgacctgaaagcatgagctgatggctggccgggtgcgctaacacccaccagccgcccatttccacagcagaaaacccccattactggaggcgtttataacatccgaactggtaatcagataaccccgccatcaccagctgcgtaagtatgagctggcaacgttcgtggctgaggtgggtattctgtgcaatctccccagccgttgctggtttatcgcttaattcattgaaaacagcctttgccgtttctgtcatatcttcctgatttagcatgtcttttacctaaaattagttgcgtgacatacagataactctggttggtgataccagcaagagaagaatttgattctgcaaccaacaaggcctttaggcatcaggcaggaatgagatgcaataaaaaaaccacccgaaggtggtcttatatgaatctttaacgcggacttagcaaatattccacatcatcgtactaccgttatggttttcgataatttttgcggctgggctagtaccaaaagagtgcatatagcaatgatgaatagtaaggaccagatcctgcaacgtttggtcactctctagctccatgatatttaaaccaatattttgagctttgtccaaatgaatatgtctggcatgtgcatacgttgcttggtggttgtttaactcatcacatatacgcttagccttagcttcagcgtcagcctgacctgcgaacataccagtacaaagccatttctggacaatttcgttcgcccagagaattgctttttcacactcgccaatcaacgttggatttagtttttggaacgtaaattgccaccattgcagtgcagcagggttggcaaaaatttccgcttttgctctctcatactcctcaataattgcatgagatgataacccattaaactgtggatcaattggccccaagttcgactgtttacctaaaacgatctgctcagcacaacaagcaagcattgtgccacaactcattgaaatcataggtacaatcgctcggatattggttccgaactttgaacgaagataatgaccaattgattctagagctgcgatatcgcctccaggagtatggagtaagatatccaatcccagactcgtatctaacccattgatagcagacataagaccatttttatcatcatctgacatctggatcagatgttgaaacccaggcccccctttttgaaggaagcctgagtaataagaaattacatttcggccagtatgtttcgataaatcacgtaagtacttgtggcgaacctcatccgctggtgtacgttgagcgatagtacccatctcacccaatacgtctatccaatttggcatgttatcaatttatcagtatgagtacagttggtgagattgctgaccgttctgctcagtagtatttggtgttactgtgctgtatgaatagagcacaccacttctcacattcagatcgttttgctgagcgagaacacgcatagcaaaatgctgtacggattcgcctttttgaaactcttggggttgtatgcccattttttcgtaaaattcagcagcgctcatgatatgtccctcgtttttttctacatctatgcaattccaggagccatcaacacaagatgtagtagttagcagtcgtcaaatacacgaaaagcctcaagatgaggcttaaaaagattctttttgataaagatttagccaaactatagcggtcaaaatgcagatttgacaagtataaaaagcacttaaagcctataaataggcagtttttgagaattaaagcatctttaatgaggttgaacaaaatgcagtcttgacgctgaacaggactttactggaacgtagagctaaatggttcgatttcatgaaccagttacaaaaaaacccgctcatcggcgggtttataaaactttggcaacatatcaaatatgcttcaaatatggcttattttgttgcattttgcaagcgtgtttgaaggagatggtgaaatttacttcacatttctgccactttgagggcttcttcttcctcatagtattcaagagccatggccaacgcagattcatcaagctgggtaaaagcggcctttaacccagcccagtgccctgaatagacacgcaaccatgtcgaacggtcaacgctaaccatgcgggccaacgctgcaccagcatagtctttataggtttcattatttctggttgcggcaatttcctgccctgccagccataccaggcctatcagtttctttactacgcgctcctgaagggagttatcacccaggcatttctgataagttttccagacgtattcacacatcatcacctggtgcttatagctaaggtcaaaaccgtagcagtaccgcaaccaggcctgctggtatccactaagcgcggacactgccctacgccacggcgcggactcaaattccgcatcttttatcggcggcattggcctgcggcggctgcgtgtttccagcacatacagtggcgcggaaagtgagttaacaaagcgtggccccttctctccttcgagttcgacgagatgaattccacggcgaggggtggcatttttgtctgctggtgggtgttcactgaaagcctcaagctgcccttttgttcccccagacaggtcaggtagcgcgcggcgcaattctattcttacaaaattcaggtcttgttgattcatgcttctttgcgctccatacacttaagctttcgcaattacgccgatcgccagcgcccgatccataaaacgcagtagcagctcaagctgcgtaccatgcttctgctcgaatgccggtacatcggcgtgtaactcgtcgtggcactctctgcacagagggatcacgaagagatcatgggcttttgttgctgtcccccccataccgtgccctacgatatggtgcggatcatctgctggccgtcggcaacactcacagggttgtgttttaacccagcgggtgtacgtctcatttatccagcggcgtcgctttggcctgagcatgaaagattctggagactccggatcaacagagagcgtgaggatcttcttcgccttctcctgcacgaggctggttgcagaagcggaaggcacaatgtcgctttccctcatgaccgagcggatcttatcatccggaaggcgtagccccttgtgcgcaacgctttccggaataacatcagccaggtcgtttctgaccatccaccagcacagttccggaagcgtcaggatatgcgactcgggaaaaccagaatcacgccgaatgacttccagaatccaggataccaggtttcctgccgctatacctgcaagctgttcggtatgctgccccgacaaagtgtgatcgcaatgccagcacaggcgaatacttcctggtgggtgccgcattgttgtgaagttcttgtcgtgccacgatgaatgtggccactggcattcaaaccgattactcaaccattgctcaagggaaggaagcccaccagcacgctgaataacccgatcattctcgaagacctgccgcattaccggatcatcagccagcggctgaatggcggcgggaacagctcctgtactgaatgacgccatttcttctggttcaggctcaagcagaacgcgaccgcgcataaagaggtgcatcagttccgcgccgggacgaaacaacacaatccccatacgatgggcgatctcgggggtaagcagagctctcacgcgacctgccccctggcaatgtgttctgcccacagtccaccaatccagcgcacgcctttcgccgtgaaacgtgcctggctgaatgcatgatttgaggttacggatgtgccggttttcacttcaaaacggcccgcatcaatatgctgatgccgtggggtcatcgttccgccaagacgatacatgatgtcgttctcaaggaggaataaccgcagatcgggctctttggccttaagcagttttgccacctggcggaatgacattgacccactggctgtacagtaccgatcaacaaacgctaccttcggcgccgcggcagccagttcgttagtcaactgctgtttttgttctgcaaggtcagctgcaagacgtagggcttcagagaatgattgaggaatcgtctgctgctgtgcctgctcaagctcctgccagcgatcaaccagacgcgcggtaaactccggcgacagctgcgcgacaacgatataactgtcccgcttccctatcagataaaccgataccgactgattgaggtgatttttaacttcccccattggggggagttcaataacaccgcgctctgccaggcgttcaatggaccgtttaacatggtcatgtcttgattccaccagctcagcaatatcgctgctggacatggttaacgctgttgttgctaactggctcatacttttctccatatcaggcggctgcacccgccggttcatatctgctgattgttatctctacccgacctttcggcacaacgggtccccattccaccagcatgcgcttaatctggctgtcgtcttcccagacacccgcatgcgtcagcgcgtcaaacagggctttgttgtaattatcgatatcccggcggcgcgcatccggcgggtacagagtgatttctaccgctgccagttcagtcgatggcttcgggagacgtcgtaattgctcaatgatcgccacgcaggcagcgctctggtatttacggccagcggcgctaatgaggtgacgaccggccagcggccccttgttaggggcgcgccagtaagtgttcacgctcggaggaaaaggcaggatcagtttcacgcggcctctccccgcatattgcgaacaagttcagaagcagcagtaatgatttcgctggtggcagtccgctccagccagagttgattgatattggctttcagcttgtgttgcagtgactcatccagcatgtcagcaccatccacctggtcgaatacaattctaacctccagcggccagatacgggactcgggaagcggatccgatactggtttagctttctcacgaatgtgcatgcggatctggcgaatattggaccaactggaaacatccaggcttcccatggctgcaatgaagtcagtgctgttcatgccatattcaccggatgcttcaagggcaacagtgcgaatacgttccgacatatccaggcgcacagcagcgtcatcgaattcaatcgacaacagccactcatccacaccgaacaaaatactctcacgaataagcagcttcgctttgtcgatcgttaaaggtgatacctgagtgaattccggtgcttcgacagaatccgccgcccaggtatgcccaaacttcgattcactgaatgtgtattcttctttatcgccaaacgcagctctaacgcatgcccacgcctcgacaccgctgatagcaaaaatatctttctgggtgagtggcaactctgcttctggcttatcagctgcaggaggtgtggcagttacaggttgagacttgctggcagcaaattgtgccaaagccataaacgcccgcccttttgcctccagttctgtgcggttgatatagctgaaccgctcgccacgccatgacttatcgaatacagctatggcaccggcaaaaaacgcgctggtgggtttctgtttttcgtcagcaggtacaaaccacacaggcagatcgaacccaatgcgcccgcgaatgaatacaatgtgatcggcatcttccggccaccacgtttcactcggcgcggcttttatcaggaatacatagcgaccgcccttctcgcgctgggctgctgcgtagttcatgatgtgcgtcatgccggtgatcgcctgcttctcgtggtactgcgaacggctatacggtgggttgccatagccagcgccacccagttcagccagacgttcagaccagtcctgcgtcagcgcgttatcttcggcggtgtaccatgccgggcatttcgcgttgtcgtcgtcagcaaacaaatccagaactaatggaccaaatagcgcgttgatcccccaaaaaagcagatccggtgtccgccactgatcgccaacctctttcaattcgtgagctggtttgctacgcagtgccgccagcgcctggcaatatttattggtcatcatgaacggaaccccgaattttctggcagtgagtaatcaacactctggaagtttgcgcggctggctgagttagtctcccatttgccgttaacgcgttcaggccggccagcactggaccatttggtcgcgctttgcaggtaaccagggaagttttttggaatgaacagagttgccgggcggaggtattgcgcctgctcgctatcacgccaatcggcatttttgtaatccactaccaagcacaggtcatcaacagtgaattgttcccgaagacgggcgcgaatattctccagcgacgtgctgcatacctggtagcgtgagccagtagtctgattcaggtaagacaaaacctgtctggcctgatcagtaatcacaacctcagggtcgggttgcgccgcaaccggacaagagggttttgaagttacttgtggttcttgttttgattttactgacggatccccaccagattctgacgggtcaaaaccgccttttttgctggatttcgacgcctcaaattttgacgggtcggattttgatgcatcagattttgatgggtcagattttgatgcgtcagattctgacaggtgagaaaaagcagcctctcgcaacttaacgacgttaagctgatatacgttcgatgcgttacggttcccattacggcgctgcttacgggaaagccagccatccttctcaagctgagcaagggccgtccttaccgtactttctccagcaccgatttgacgtgcgatcgtgccaatagacggccagctaacaccctcatcactactgaagtcggccagacgcgccatgatggcaacgctggataacttcatgcctgacgaagcgcatgcatcccatacgtaaccggttaatttagtgctcatggtcgtcctttaattctgtaaatttacgctggaattgttcaagagggctgaagcactcatgatcgtacccttcgcgaaggtatataacgcgctgtgtatctggctcccagcggacaactctgacgggaactccgtagtgatctctgaaccgccggttaacttcagccattcctcgcgccccttctcgttcatctgaacaaatgcttctaccatcaagtctgctggctggtagttgcctccatcagccgcgttatttatgatttccacatagccgaactgggcatctttacccaccagcggcaaacatctgaattgcttagctggtctgaatcggtttacactgttcatgcgttagtttctccactgatacgacacgccaaggcgcccggagctgcacactcgcgggcgtcaccttttctgcctgttgaaacgaatacgtcaatcgcctgatctgaaacaccaaccccataaagcgccataaatcccaggaacccgtgaatctggtggcggagcttcttactgaataattctgaaagcattttgcgctctgatgaatcaattaccccatcagccgctgctgccatcttggcattagccagctcaccagatgctgctgccgctttcatctcaatgctgtacagctcaacgttatccaggctctcagcagttggaacatccaccagccatttcccttttcggttcgcctggtactcggccaagtaacaagaaccagacaggtcctccatccgttccagttctgccaaggtaaagaaccgactgccacacttctggtacaggtggttgtggaactggtcgatagtcatccctaaatcggaagccatacctaagcgaccatgcttgtgtgccttacacatcaggcggattgctgtatttatgctgtctaccatgttgatttccctctggtagttaataatcaacttaaagttgactattgttgttagcggaaggtatgccgtcatttttgttcggataaatatcaggtcgtaattgatggggagttactacccatccgccccattggcagagttgaataactctttcagaaggtactcggttctttgcaatccagttcgcaacagattgaactgattggaattcaaaccgccttgatacctctgaaatcgacccgatcgccttcacagctttagctgttacattcttgtgttgagatgacatgtgttctcctatgactaagcctgcatcaatactacttatagtagcaattattagcaacttaaaatagaaatgacaactatgccttgtgcgcttaatcttctacttatggtggaaaatgctaaatacaaagactttgccgaaaggctaaacaggtctctccaagagcaatctattggagttaaagaattgtcagagttcagtggtgtctcgtatgagatggcgcggcgctacactcttggtactgcaaagccgagagatgagaagatgattcgaattgcagaaagacttgccgtctcaccggcttatcttgattatggtgtgcctgttaatggtggcgacgcgccagccaaaggcacggtcagaatagagcaattggatgttcatgcttcagccggttccggatatataaaccaaccattccctacaatagtgagctcaatagagattccagaagagaggatcttcgagttgtttggtcgtagaagccttgatggcatcgtcatgataaatgttgatggcgatagcatgatgcccacgctttgcccaaaggacctgcttttcatagacagcaaggttgaacaattcagcggcgacggcgtttatgtgttcaattttgaagacagtacgttcgttaaacgtttgcagaaggtaaaagggcgccgactggcagttctttcagacaatgaacattacccgcccttcttcatagaggagcatgaaatgaatgaactatacatattcggcaagctaatcagatgcttacctctaaaaatgatagagtttggctaataattaattcatcaagaaaccggcgaaagccggttttttttacgcctccaattcctcacctcataacactacactactaaaaatttcattttctactttttgttgttgcaattatctacttaaagtagctatagtcattgcatcgaaagcgaacaggcaggacgcccacgaagtagccgccggtggcatatgaataaccggatgattcgctgacagaaaacttaggttgggggtagaggtttacatgaatcatttattcacatgctcattttgcggagcaaccgaactgggagcgataaagatcgtcgcaaaaggtggtaaggacgaacctgccatctgttcggaatgcgtagtcacatgtgtagaaaaaatgatcctgactaaaaaatcagaggctgaaaaaccaacctctgataacgaaataatatcagtcgataaaaaactatttaaagagcttcttcagcttgtcctcaaccttcctgatttcggaagtaagctggctgctgttgacattgatagtagctccacatcgacaagtgaaacttttgttcgacttgagccaagcgattttcttcttcgtcttagtgccgcacttagggcatgcgggtaacgtaatttcctggttatcaaaagcgcccataaacatccctcttggttgtgtgagaacaccaagataccaccgcgcctgatgtggttaaaagcaggctaaagcaataacaagtaactccctgttctggcggcccggtgttttcccgtgtatttccggtaaccgccagcctttttcagggcacaacagaaaagggcatcaccgggcgacgggctcataacccaatccacccgggcaaaaagaaagcggtctctgcaagccgccgaccaatgcaggtgcccttctctgttgtgtatggagaaactaactttttagcgtctgtgcagatgcgctgaggaaccgagaatgaataatccgtttttcaaaaatatgttggtgtatcgcattagtcgcgatttcaccatcaaccaggaagagctggaacagcagcttgaactatttcgcttcactccatgcggtagccaggatatggcaaaaaccggttgggtatcaccacttggtcagctgtcagatcgcttgcatcacactgtcaataatcaagtgttgttggttattcgccgggaagaaaaaatactgccatctcctgtcattactgaagaactgcgcaagcgtgtgtcgcgtctagaatccgatcaggggcgtcgcctcaaaaaaactgagaaagattcgctgcgtgatgaagtgttgcactccctgcttcctcgggcgttctccaaaaactcgactgttggtttgtggatcaacgtcaccgacggtctgatcatggttgatgcagccagcgctaaacgtgccgaagactcactggccctgcttcgtaaaactctcggttctctcccggtggtaccgctgactatggaaacgccgatcgaactaactatgaccgactgggttcgttccggtagtgcgcctgctggctttggcctgggtgatgaagccgaactgaaagctattcttgaagatggcggtattggacgctttaaaaaacagactctggtcagtgacgaaattcatgtgcatctggaagctggcaaagtagttacaaagctgtctatcgactggcaacagcgcattcagttcgttctttgcgatgacggcagcatcaaacgccttaagttctctaatgagattacagaacaaaacgacgatatcgaccgtgaggatgcggctcagcggttcgacgctgactttgttctgatgaccggcgagcttatctctctcattaacggattaacaacctctctcggcggcgaagccaagcgataaacaccaggcaacaattacccccataagcatgggttgggttgctgcacgctaaattcagcaattcattaatttaatggcgcggtgcagcgcgccaatatggagaaaaccatgagctacattcagacattatccggcaaacattttaattacctcgatatccaacaggacgatatcgtgatcgaggatattgctaccgcgttgtctcatatctgccgctttgcagggcatcttcctgagttttacagtgtcggccagcatagcgttttaaccagccacctcgttccgcaggagtttgcattagaagcactgcttcatgatgctgctgaagcctacctgcaggacatcccctccccacttaagcgcctgcttccggattaccaggcaatcgaagctcgtgtggacgcagccattcggcagaagttcggtctaccaactgagcaacacccaaccgtgaaatatgccgacctggtgatgctcgccagcgaacgccgcgattttgagattgacgaaggttccatttggccatgcctcgagggagttgtcccaacggatttattcattatcaacccagttcgtcctggccagtcatacggcatgttcatcaatcgctttaacgagttgatggagcagcgccaatgcgccgcatgaaggtaaaagaactcgtagcggaggcgtttgcctccgttgctgaattgccaccaaagcatgcgccgcttatgcgcgaagtcgccaccagactggacgctacgttcgcagcattaaaagagtctctggtgcaactggaacaggaacgtaaagataaaacgccatgaccgtatttgaatatctccaggctcatccgaataccaccagcggtgaaatcgccaaaggtatgaacaaaaagaccccagcggtcgccggagcattatctcagctctatggcaccggtcggatcgtgaagtctggtgttcgcaagggtattccaacataccgcattaacgatatgccgtttggttgcagtaacagcctaaccatgatgtttaaccagctcttgagcagagccagacaaggagcagcccaatgacagcactcaacaaacaggcgctgcgtgaagaattccagttcatgcaggacaactatagcgacccggcagaccacgatcggcaggtgatttacatcgaggcggaggcgctgctggatgagttggaagccaaagactcaacgatagcagcacaacaacatgagatccgtatgttgctgaatgcgcttgaggaaaaaccatgcccgaaatgcaacgacacaggaatgactgatagtggcggcacgcagccatggggcgagccgattgagattgaatgcgactgccgacagcaggatgccaacaccgcagaacttgtagccgctggcattggcgtgaagggggagtgagatggataaattaatcaaacctaccgccaaaggtaaatatgacggttcatgtgattatctttgctcggaagatgcgcgattcatcgttatgcgcggcgattatacggaagcggaaataattcaggcttctgtgtctcaagatgtaatcgactcggatggtgcggctgattttgcaagtagcgcccgctattatcagtgctggtacaaagttagcccaataggtggtcaggatggctattcaggctggcatcatcctcgtgattcgccgtgtcgcggtgcatatttcgcatcagttttgcaatgggattaaggaggactaacccatgacaactaacaaccacccggcgcacggtcctgtatcactcgatcgcctgcaccagatacgcgaacacctgctgcatgatacccaatactcaaacggcgggaacagagcctacattctcgctgatgtattgaaggtgattgatggggctattgcccgcgagctggtacgccgtgagcatgcagcgtggtcacaggctactttcggcgatgtcggtccagttggtccgctgaagcacctttccaaagaagcgctcgaggctgctgctgaaccaggcgaccttagcgaatgggctgacatgcaattcctgttatgggatgcgcaacgtcgtgccggtatcagtgatgagcagattacccaggcaatgataaaaaagctggctataaataaggttcgccaatggcctgagccgaaagacggggaacctcgattgcatatcaaagaacagtcagagcaggagaaaaaataagaatgtttagcctgattcggcgcggtcaaatctacacggacagtagcaactggcccgtaattatccatagctgtagtgatcactcggtccgaattaaacgcaatgatggcgagctgagaacgattagcatcaaacgctttaacgaagattttgaacgagtggagcatgatgagtatcgcaaaatatgtgccgaaatagagcaggaaacaaacctgaaaaacctacgtgcgatgcgtcgcggcaagattactgaatagccaaacaggagaatatttaacgtgaacaacttaatgatcgaccttgagtccatgggcaaaaaaccgaatgcccctattgtctccattggtgccgtattcttcgatccgcaaagcggtgaactgggtcaggagttttacaccgctgttaatcttgaaagcgctatggagcagggagcggtgccggatggtgacactattctgtggtggttaagacaaagctcagaagcacgatcagcaatctgtgttgatgatgcgatgccgatatcatctgccctatctgaactgagccatttcattaatcggcattctgataaccctaaatatttaaaagtttggggcaatggagctactttcgacaacgttatattgcgcggcgcatatgagcgtgccggccaggtttgcccgtggcaattttggaatgatcacgacgtcagaaccatcgtcacattaggcagatctgtaggtttcgatcctaagcgtgatatgccatttgatggggttgcacataacgcactggctgatgcccgccaccaggcgaaatatgtttcagcgatttggcagaaactaatcccaaccaccagcaacagctaaagttttccccgggtgcagccgggataatggagaaataactatgagcaatattttccagttagctcccaacgattgggtttgtgaaagcgttttgatcgcggttactgggctcaaacccggaaccatcctccgtgccagaaaagaatgctggatgattgggagggagtatatccacgtatcgcctgacggaaatcctaaaccttccagtgagtgcatgtataacagaaaggctgtagatgcctgggtcgcttcaatgaaaagcaagcaaccagggtgatttgatgccatgaaaaaggtaagctcgtatcgctcttgggcgtctggaggtaacaccaatggataaagtcacatatccaacaggcgtcgaaaaccacggtggcacattacgcatctggtttaattttaaaggtaagcgtgtcagggaaagtctcggtgtccctgacaccgctaagaacaggaagatagccggggaactgcggacatcagtatgttttgccatccgcacaggaacctttgattatgcaacccagtttcctgactcccctaacctcaaggcttttggtgtaagtaaaaaagacattacagtgaaagaacttgaagaaaaatggctggatctgaaacggatggaaatctgcgcgaacgcatttaatcgctatgaatctgtcgcaaggaatatggtgccgaggatcggaggtaatcgcctggtgtcagcagtaaccaaagaggaattgctgtatctgaggaaatatttgctaactggttatcagaatccgacgaaaaacaaagccccggcaaaagggcgaagcgttgttactgtgaactattacatgacgacaatggccggaatgtttcagtttgctgcggatcacggttacttagaggtgaacccattcgagggaattaagcctctgaaaaaagccagggcagaaccagatcctctgtctcgtgatgaatttattcgcctgatagatgcatgccggcatcagcagacgaaaaacctgtggtcattagcagtgtacacaggaatgcgtcacggggaactggtctccctggcctgggaagatatcgacctgaaggctggaacaattaccgtcagacgtaattatacgaaacttggtgagttcactctaccgaaaaccgaggcaagcacagatcgagtggtgcatcttatccagcccgcaatcagtatcctgaaaaatcaggctgaaatgacaaggctgggcaggcaatatcacattgaagtgcagttacgtgagtacggccgttcggtgaaccatgagtgtacattcgtctttaatccgcatgtggtcagacgcagtaagcaggtcggatttatctaccgggtcgattcagtaggcgactcatgggaagcggcacttaagcgtgcggggatcagacacagaaaggcgtaccagtcacgacacacctatgcgtgctggtcattatcagctggtgcaaaccctagttttattgccagtcagatggggcatgcgagcgcgcagatggtgttcaatgtttacggtgcatggatggctgacagcagcgcagagcagatcgcaatgctgaatcagaagctggcagattttgccccattgatgccccatagccacgagaacagtacgggaggattattaaaatcagtaagttaacccctaacgcccgtcatgttaactgtgtggagggtaacaccacgctttatgccctgccgaaacccgaggttgtcctgcgctggcgtgagcagaccacagatgacttccgcttctgttttaagtttccggcgaccatttcgcatcaggcagcattacggcattgcgatgatttagtgactgaatttttgacccgcatgtcaccgttggctccgcgcattggacaatactggctgcaactgcctgccacattcggcccacgggagctgcctgcgctttggcattttctcgattctcttcccggtgaatttaattatggggtggaagtccgccatccacagtttttcgccaaaggggaagaggaacaaacgcttaatcgcggtttacatcagcgcggcgttaatcgggtgattttagacagccgcccggttcatgcagcacgtccatacagtgaagctattcgcgacgctcaacgaaaaaaacctaaagttccggtacatgctgtactgacggcgaaaaatccactgatccgttttatcggtagtgatgatatgacgcaaaaccgggaattatttcaggtctggttacaaaaattagcgcagtggcatcagaccactacgccttatctttttttacatacgccagatattgcccaggccccggaactggtacataccctgtgggaagacttacgtaaaacgcttccagagatcggagcagttccggctattccacagcaatcttctcttttctgaatttgccacctatcatagacaggtgccatcggccattttaaagggagtttgtatggtaagcgcgctgtatgccgttttaagtgcgttgttattaatgaagttctcttttgatgtcgttcgcctgcgaatgcagtaccgcgttgcctatggcgacggcggttttagcgaactgcaaagcgctattcgcattcatggtaacgcggtggaatatattcctatcgcgattgtgttgatgctgtttatggaaatgaatggcgcagaaacctggatggtgcatatttgcggcatcgttttgcttgctggtcgtctgatgcattattacggttttcatcaccgtctgttccgctggcgacgttctggcatgagcgccacctggtgtgcgctgttgctgatggtgctggcgaatctttggtatatgccctgggagttggttttctccctgcgttagcgcacaatacgccactttctttttcccggatttttacgttatgtctcaccgcgacacgctattttctgcccctatcgccagactgggcgactggacctttgatgaacgggtagctgaagtcttcccggatatgatccagcgttccgttcccggctattccaatattatttccatgattggtatgttagccgagcgcttcgttcaacctggtacgcaggtttacgatctgggttgttctctgggcgcggcgacgctctcggtgcgtcgcaacattcatcatgataattgcaaaattattgccatcgacaactccccggcgatgattgaacgctgccgtcgtcatattgacgcctataaagcccctacgccagtagacgttattgaaggtgatattcgcgatatcgccattgaaaacgcatcgatggtggtgctgaattttaccctgcaattcctggaaccttccgagcgccaggcgttactggataaaatttatcaagggctgaacccgggcggtgcgctggtgctttcggaaaaattcagtttcgaagatgccaaagttggtgaactgctgttcaacatgcaccacgactttaaacgtgccaacggttacagcgaactggagatcagccagaaacgcagcatgctggaaaacgtgatgctgaccgattccgtggaaacccataaagcacgcctgcataaagccggttttgagcatagcgagctgtggttccagtgctttaactttggttcactggtggcattaaaagcagaggacgctgcatgatcgactttggtaacttttattctctgattgccaaaaatcatctttcacactggctcgaaacgctgcccgcgcagattgctaactggcagcgcgagcagcagcacgggctgtttaagcagtggtccaacgcggtggaatttctgcctgaaattaaaccgtatcgtctggatttattgcatagcgtaaccgccgaaagcgaagagccactgagcgccgggcaaattaagcgcattgaaacgctgatgcgcaacctgatgccgtggcgcaaagggccgttctcactgtatggcgtcaacatcgataccgaatggcgttccgactggaaatgggatcgcgttatgccccatctttctgatttaaccgggcgcaccattcttgatgtcggctgtggcagcggttatcacatgtggcgcatgattggcgcaggggcgcatctggcggtgggtatcgatcccacgcagctattcctctgccagtttgaagcagtgcgtaaactgctgggtaacgatcagcgcgcacatttgttaccgttaggtattgaacaacttccggcactgaaagcctttgataccgtcttttcgatgggcgtgctttatcatcgtcgttcaccgctggagcatctctggcagttaaaagaccaactggtgaatgaaggcgaactggtgctggaaacgctggttattgatggcgacgaaaacacggtgctggtgccgggcgatcgttacgctcaaatgcgtaatgtctatttcattccttccgcgctggcgctgaaaaactggctgaagaagtgtggttttgttgatattcgcattgcagatgtgagcgttaccaccacagaagagcagcgacgcaccgaatggatggtcaccgagtctctggccgattttctcgacccgcatgatccgggtaaaacggtggaaggttatcctgcgcctaaacgcgcggtgctgattgcgcgcaagccgtaaaggtctggtaatactgccggatgcggcgtgaacgccttatccggcctacaaagtcttgctaattcaatatattgcaggggctatgtaggcctgataagcatagcgcatcaggca

SEQ ID NO: 1434 - DNA, 79 bp, Artificial Sequence
  source: /note="Description of Artificial Sequence: Synthetic primer"
tggaggctttaagaaatacctcgatgtgaacaaccgcctgccacgaatcttcgtcaagcgattacacgtcttgagcgat

SEQ ID NO: 1435 - DNA, 79 bp, Artificial Sequence
  source: /note="Description of Artificial Sequence: Synthetic primer"
gataatggtgagattatccccggttataccggacttatcgcctattcagaatcactggatctgacatgggaattagcca

SEQ ID NO: 1436 - DNA, 28 bp, Artificial Sequence
  source: /note="Description of Artificial Sequence: Synthetic primer"
gtgattaagtacgtgaaatcgactgaac

SEQ ID NO: 1437 - DNA, 20 bp, Artificial Sequence
  source: /note="Description of Artificial Sequence: Synthetic primer"
ctctgtcggcaacatgagga

SEQ ID NO: 1438 - DNA, 79 bp, Artificial Sequence; identical to SEQ ID NO: 1434
  source: /note="Description of Artificial Sequence: Synthetic primer"

SEQ ID NO: 1439 - DNA, 79 bp, Artificial Sequence; identical to SEQ ID NO: 1435
  source: /note="Description of Artificial Sequence: Synthetic primer"

SEQ ID NO: 1440 - DNA, 20 bp, Artificial Sequence
  source: /note="Description of Artificial Sequence: Synthetic primer"
tggaggctttaagaaatacc

SEQ ID NO: 1441 - DNA, 20 bp, Artificial Sequence
  source: /note="Description of Artificial Sequence: Synthetic primer"
gctggcgattcaggttcatc

SEQ ID NO: 1442 - DNA, 40 bp, Artificial Sequence
  source: /note="Description of Artificial Sequence: Synthetic primer"
gctggcgattcaggttcatcgttttcaccgtaacacgcca

SEQ ID NO: 1443 - DNA, 42 bp, Artificial Sequence
  source: /note="Description of Artificial Sequence: Synthetic oligonucleotide"
tcgacatttatcccttgcggcgaatacttacagccatagcaa

SEQ ID NO: 1444 - DNA, 49 bp, Artificial Sequence
  source: /note="Description of Artificial Sequence: Synthetic oligonucleotide"
ggcgcgccttgacaattaatcatccggctcctaggatgtgtggagggac

SEQ ID NO: 1445 - DNA, 50 bp, Artificial Sequence
  source: /note="Description of Artificial Sequence: Synthetic oligonucleotide"
ggcgcgccttgacatcaggaaaatttttctgtataatagattcatctcaa

SEQ ID NO: 1446 - DNA, 51 bp, Artificial Sequence
  source: /note="Description of Artificial Sequence: Synthetic oligonucleotide"
ggcgcgccttgacataaagtctaacctataggatacttacagccatacaag
